(19) United States
(12) Patent Application Publication
(10) Pub. No.: US 2024/0425856 A1
(43) Pub. Date: Dec. 26, 2024

(54) Compositions and Methods for Treating Cag Repeat Diseases

(71) Applicants: Iris Medicine, Inc., Berkeley, CA (US); Board of Trustees of Southern Illinois University, Springfield, IL (US)

(72) Inventors: Philip J. Jensik, Springfield, IL (US); Keith T. Gagnon, Springfield, IL (US); David Corey, Berkeley, CA (US); Eleonora de Klerk, Berkeley, CA (US); Megan Blewett, Berkeley, CA (US); Melissa A. Kotterman, Berkeley, CA (US)

(21) Appl. No.: 18/699,523

(22) PCT Filed: Oct. 5, 2022
(86) PCT No.: PCT/US2022/077572

§ 371 Date: Apr. 8, 2024

Related U.S. Application Data
(60) Provisional application No. 63/339,363, filed on May 6, 2022.
(60) Provisional application No. 63/253,070, filed on Oct. 6, 2021.

(51) Int. Cl. C12N 15/113; A61K 9/00; A61P 25/28; C12N 15/86

(52) U.S. Cl. CPC C12N 15/113; A61K 9/0019; A61K 9/0085; A61P 25/28; C12N 15/86; C12N 2310/14; C12N 2310/531; C12N 2750/14143

(57) ABSTRACT

The disclosure relates to compositions and methods for the production and therapeutic use of inhibitory double stranded RNAs.

### CROSS-REFERENCE

[0001] This application claims the benefit of U.S. Provisional Patent Application No. 63/253,070, filed Oct. 6, 2021, and U.S. Provisional Patent Application No. 63/339,363, filed May 6, 2022, which applications are incorporated herein by reference in their entirety.

### INCORPORATION-BY-REFERENCE OF MATERIAL ELECTRONICALLY SUBMITTED

[0002] A Sequence Listing is provided herewith as a Sequence Listing XML, “IRIS-001WO_SEQ_LIST” created on Oct. 4, 2022 and having a size of 1,298 KB. The contents of the Sequence Listing XML are incorporated by reference herein in their entirety.

### BACKGROUND

[0003] Repeat expansion disorders are autosomal dominant genetic disorders caused by expansion of DNA repeats. DNA repeats may be composed of single nucleotides to dodecamers or longer. The threshold at which repeat expansions become symptomatic varies with the particular disease. There are over 50 distinct diseases caused by repeat expansions. Repeat expansions may occur in coding or non-coding regions of genes. Repeat expansions may cause defects in a protein encoded by a gene; change the regulation of gene expression; produce a toxic RNA, or lead to chromosome instability.

[0004] Inhibition of both mutant and wild-type expression of a repeat-containing gene may induce significant side effects. Thus, suppression of the mutant repeat expansion allele is a desired therapeutic strategy for repeat expansion disorders. Current strategies for mutant allele-specific inhibition include targeting disease-associated single nucleotide polymorphisms (SNPs) or deletions with antisense oligonucleotides or RNA interference agents. However, identifying SNPs associated with repeat expansion mutations requires detailed population-specific genetic studies in large clinical cohorts. Furthermore, depending upon the frequency of the target SNPs or location on the mutant repeat expansion allele, certain affected individuals or populations may be excluded.

### BRIEF SUMMARY

[0005] The present disclosure provides a double-stranded RNA comprising: a) a first strand that hybridizes to a target CAG repeat region of a CAG repeat containing RNA; and b) a second strand that hybridizes to the first strand, wherein the first strand comprises: i) a first mismatch to the target CAG repeat region; and ii) at least a second mismatch to the target CAG repeat region. The present disclosure provides a DNA molecule comprising a nucleotide sequence encoding the first strand of the double-stranded RNA, where the nucleotide sequence is operably linked to a promoter that is functional in a eukaryotic cell. The present disclosure provides a recombinant nucleic acid comprising: a) a double-stranded RNA of the present disclosure; and b) a microRNA scaffold; the present disclosure also provides a recombinant expression vector comprising a nucleotide sequence encoding such a recombinant nucleic acid. The present disclosure provides a DNA molecule comprising a nucleotide sequence encoding a recombinant nucleic acid comprising: a) a double-stranded RNA of the present disclosure; and b) a microRNA scaffold; the present disclosure also provides a recombinant expression vector comprising such a DNA molecule. The present disclosure provides viral and non-viral delivery vehicles comprising a recombinant expression vector of the present disclosure; and pharmaceutical compositions comprising such delivery vehicles. The present disclosure provides methods for selectively reducing translation of a disease-associated CAG repeat-containing RNA.

[0006] In some embodiments, the present disclosure provides a double stranded RNA comprising from 5′ to 3′: (a) a 5′ leader sequence; (b) a 5′ stem comprising a passenger sequence or a guide sequence; (c) a 5′ linker of 1-6 bases; (d) a terminal loop; I a 3′ linker of 1-6 bases; (f) a 3′ stem comprising: (i) a guide sequence if the 5′ stem comprises the passenger sequence; or (ii) a passenger sequence if the 5′ stem comprises the guide sequence; and (g) a 3′ trailer sequence; wherein the guide sequence targets a CAG repeat region of a CAG repeat containing RNA (e.g., mRNA or pre-mRNA) and comprises 1-5 base mismatches relative to the CAG repeat region, wherein the base mismatches are located at positions 8-16 of the guide sequence.

### BRIEF DESCRIPTION OF THE SEVERAL VIEWS OF THE DRAWINGS

[0007] This patent or application file contains at least one drawing executed in color. Copies of this patent or patent application publication with color drawing(s) will be provided by the Office upon request and payment of the necessary fee.

[0008] FIGS. 1A-1D: Cloning and design of shRNAs expressed from a custom U6 promoter-driven construct. (FIG. 1A) Plasmid map for customized pxTRC-EGFP-puro. (FIG. 1B) Initial shRNA expression cassette (SEQ ID NO:760). (FIG. 1C) shRNA construct modifications to improve shRNA processing accuracy and abundance (SEQ ID NO:761). (FIG. 1D) shHD1L-1 design (SEQ ID NO:762). For FIGS. 1B-1D, green markings show Drosha cleavage on the 5′ leader and 3′ trailer sequences and Dicer cleavage at the 5′ upper stem and 3′ upper stem; and mismatch positions in guide strand are boxed in purple.

[0009] FIGS. 2A-2C: miRNA miR33 scaffold designs for shRNA expression. (FIG. 2A) miR33 miRNA structure and sequence elements (SEQ ID NO:763). (FIG. 2B) Generalized miR33 scaffold for shRNA cloning and expression (SEQ ID NO:764). (FIG. 2C) shHD-33full-mimic design (SEQ ID NO:765). For FIGS. 2A-2C, green markings show Drosha cleavage on the 5′ leader and 3′ trailer sequences and Dicer cleavage at the 5′ upper stem and 3′ upper stem; and mismatch positions in the guide strand are boxed in purple.

[0010] FIGS. 3A-3B: Cell based evaluation of select shRNAs targeting the CAG repeat expansion of HTT. (FIG. 3A) HEK 293T Luciferase assay results for several shRNAs targeting CAG repeats. Wild-type (wt) and mutant (mut) constructs are indicated and percent luciferase activity is normalized to scrambled shRNA control. Mean of two independent replicates is shown. Error is standard error of the mean (S.E.M.). Statistical significance is indicated by p-values less than 0.05 (*) or 0.01 (**). (FIG. 3B) Quantified knockdown of HTT wt and mut proteins in patient-derived cells assayed by Western blot and fit to Hill plot equation. Single replicate or mean of two replicates is shown. Error is S.E.M.

[0011] FIG. 4: is a graph comparing shRNA abundance for a virally encoded shRNA having a guide sequence perfectly matching the CAG repeat region of HTT mRNA vs. a virally encoded shRNA having a guide sequence comprising mismatch(es) relative to the CAG repeat region of HTT mRNA, wherein the mismatches are located at positions 8-16 of the guide sequence.

[0012] FIG. 5 is a graph showing that lentiviral constructs encoding allele selective shRNAs significantly decreased expression of the pathogenic HTT allele (mut-HTT) in fibroblast cells transduced with shHD-33full and shHD33-fullmimic compared to the normal HTT allele.

[0013] FIG. 6 depicts co-localization of DARP32 and GFP staining in zQ175 mouse striatum.

[0014] FIG. 7A-7B depicts western blot analysis of wild-type (WT) and mut HTT protein in striatum of zQ175 mice in the AAV9-shHD33-Full-Mimic treatment group relative to the AAV9-shScr treatment group.

[0015] FIG. 8 depicts dose-dependent AAV delivery and GFP expression in the striatum.

[0016] FIG. 9 depicts allele-selective knockdown in vivo with a small binding RNA (sbRNA) delivered via a recombinant AAV vector.

[0017] FIG. 10 depicts transduction efficiency in the cerebellum following ICV administration of recombinant AAV virions comprising a recombinant AAV encoding an sbRNA.

[0018] FIG. 11 depicts allele-selective knockdown in vivo with a small binding RNA (sbRNA) delivered via a recombinant AAV vector in a SCA2 mouse model (left panel) and partial restoration of expression of key cerebellar genes that are molecular markers of pathology in ATXN2-Q127 mice (right panel).

[0019] FIG. 12 depicts the effect of sbRNA on preservation of wild-type (WT) gene expression in ATXN2-Q127 mice. Protein levels were unchanged for non-target genes containing CAG repeats.

[0020] FIG. 13A-13E depict the effect of the registry on knockdown (FIG. 13(A) Guide Strand Column, SEQ ID Nos:406, 873, 406, 406, 406, 874, 875, from top to bottom respectively; Loop Column, SEQ ID Nos:876, 876, 877, 878, 876, 879, 876, from top to bottom respectively; Passenger Strand Column, SEQ ID Nos:881, 880, 880, 880, 880, 882, 883, 884, from top to bottom respectively) (FIG. 13(E) SEQ ID Nos:868, 869, 870, 871 and 872 from top to bottom respectively).

[0021] FIG. 14 is a schematic depiction of a guide sequence screening system.

[0022] FIG. 15 depicts knockdown and allele selectivity using various guide sequences.

[0023] FIG. 16 depicts guide sequence screening and allele selectivity.

[0024] FIG. 17 depicts the effect of the number of mismatches to the target CAG repeat region on knockdown and allele selectivity.

[0025] FIG. 18 depicts the effect of a single mismatch on knockdown and allele selectivity, where the mismatch is at position 8, 9, 10, or 11.

[0026] FIG. 19 depicts the effect, on knockdown and allele selectivity, of distance between a first mismatch and a second mismatch, when the first mismatch is at position 8, 9, 10, or 11.

[0027] FIG. 20 depicts the effect, on knockdown and allele selectivity, of distance between mismatches in guide sequences having three mismatches (left panel) or four mismatches (right panel) with a target CAG.

[0028] FIG. 21 depicts the effect, on knockdown and allele selectivity, of distance between mismatches in guide sequences having three mismatches with a target CAG, where the first mismatch is at position 9, 10, or 11.

[0029] FIG. 22 provides Table 6.

[0030] FIG. 23 provides Table 7.

[0031] FIG. 24 provides Table 8.

[0032] FIG. 25 provides nucleotide sequences of sbRNAs comprising miR451 5′ and 3′ flanking polynucleotides.

### DETAILED DESCRIPTION

[0033] Repeat expansion disorders present significant obstacles for selective inhibition of disease allele versus normal allele. The present disclosure provides double-stranded RNAs that can exploit differences in the number of repeats and achieve allele-selective inhibition of repeat-containing proteins. The double-stranded RNAs target the repeat region of a repeat-containing target RNA molecule (e.g., mRNA or pre-mRNA) and contains 1-5 (e.g., 1, 2, 3, 4, or 5) nucleobase mismatches relative to the repeat region in the target mRNA or pre-mRNA at positions 8-16 (e.g., 8, 9, 10, 11, 12, 13, 14, 15, or 16) of the guide sequence, which enhances the ability of double-stranded RNAs to selectively inhibit mutant protein expression versus wild-type. Standard design of vector encoded double-stranded RNAs targeting the repeat region of a repeat containing target mRNA or pre-mRNA and comprising 1-5 mismatches relative to the repeat region at positions 8-16 of the guide sequence revealed positional shifts in processing of the 5′ cleavage sites. Due to the shift in processing, the positions of the mismatch(es) in the guide sequence were also shifted, placing them at offset or undesirable positions. Double stranded RNAs having mismatches at offset or undesirable positions may not have desirable functions. The design of the double-stranded RNAs of the disclosure has been modified for vector expression, enhancing proper processing to place mismatches at desired positions and provide more predictable 5′ cleavage sites.

[0034] Prior to setting forth this disclosure in more detail, it may be helpful to an understanding thereof to provide definitions of certain terms to be used herein. Additional definitions are set forth throughout this disclosure.

[0035] In the present description, any concentration range, percentage range, ratio range, or integer range is to be understood to include the value of any integer within the recited range and, when appropriate, fractions thereof (such as one tenth and one hundredth of an integer), unless otherwise indicated. Also, any number range recited herein relating to any physical feature, such as polymer subunits, size or thickness, are to be understood to include any integer within the recited range, unless otherwise indicated. As used herein, the term “about” means±20% of the indicated range, value, or structure, unless otherwise indicated. It should be understood that the terms “a” and “an” as used herein refer to “one or more” of the enumerated components. The use of the alternative (e.g., “or”) should be understood to mean either one, both, or any combination thereof of the alternatives. As used herein, the terms “include,” “have” and “comprise” are used synonymously, which terms and variants thereof are intended to be construed as non-limiting.

[0036] As used herein, the term “nucleic acid” or “polynucleotide” refer to any nucleic acid polymer composed of covalently linked nucleotide subunits, such as polydeoxyribonucleotides or polyribonucleotides. Examples of nucleic acids include RNA and DNA.

[0037] As used herein, “RNA” refers to a molecule comprising one or more ribonucleotides and includes double-stranded RNA, single-stranded RNA, isolated RNA, synthetic RNA, recombinant RNA, as well as modified RNA that differs from naturally-occurring RNA by the addition, deletion, substitution, and/or alteration of one or more nucleotides. Nucleotides of RNA molecules may comprise standard nucleotides or non-standard nucleotides, such as non-naturally occurring nucleotides or chemically synthesized nucleotides.

[0038] As used herein, “DNA” refers to a molecule comprising one or more deoxyribonucleotides and includes double-stranded DNA, single-stranded DNA, isolated DNA, synthetic DNA, recombinant DNA, as well as modified DNA that differs from naturally-occurring DNA by the addition, deletion, substitution, and/or alteration of one or more nucleotides. Nucleotides of DNA molecules may comprise standard nucleotides or non-standard nucleotides, such as non-naturally occurring nucleotides or chemically synthesized nucleotides.

[0039] As used herein, “nucleoside” means a compound comprising a nucleobase moiety and a sugar moiety. Nucleosides include, but are not limited to, naturally occurring nucleosides (as found in DNA and RNA) and modified nucleosides. Nucleosides may be linked to a phosphate moiety.

[0040] As used herein, “nucleotide” means a nucleoside further comprising a phosphate linking group. As used herein, “linked nucleosides” may or may not be linked by phosphate linkages and thus includes, but is not limited to “linked nucleotides.” As used herein, “linked nucleosides” are nucleosides that are connected in a continuous sequence (i.e. no additional nucleosides are present between those that are linked).

[0041] As used herein, “nucleobase” or “base” means a group of atoms that can be linked to a sugar moiety to create a nucleoside that is capable of incorporation into an oligonucleotide, and wherein the group of atoms is capable of bonding with a complementary naturally occurring nucleobase of another oligonucleotide or nucleic acid. Nucleobases may be naturally occurring or may be modified.

[0042] As used herein, “oligonucleotide” means a compound comprising a plurality of linked nucleosides. In some embodiments, an oligonucleotide comprises one or more unmodified ribonucleosides (RNA) and/or unmodified deoxyribonucleosides (DNA) and/or one or more modified nucleosides.

[0043] As used herein, “oligomeric compound” means a polymeric structure comprising two or more sub-structures. In certain embodiments, an oligomeric compound comprises an oligonucleotide. In certain embodiments, an oligomeric compound comprises one or more conjugate groups and/or terminal groups. In certain embodiments, an oligomeric compound consists of an oligonucleotide. Oligomeric compounds also include naturally occurring nucleic acids.

[0044] As used herein, “single-stranded” means an oligomeric compound that is not hybridized to its complement and which lacks sufficient self-complementarity to form a stable self-duplex.

[0045] As used herein, “double-stranded” means an oligomeric compound that is partially or completely hybridized to its complement to form a stable duplex molecule. A double-stranded oligomeric compound may be composed of two separate strands of complementary oligomeric compounds hybridized to each other or a single oligomeric compound which has sufficient self-complementarity to form a stable self-duplex. Stable self-duplexes may contain stem-loop structure(s) and/or bulge(s).

[0046] “Isolated” refers to a substance that has been isolated from its natural environment or artificially produced. As used herein with respect to a cell, “isolated” refers to a cell that has been isolated from its natural environment (e.g., from a subject, organ, tissue, or bodily fluid). As used herein with respect to a nucleic acid, “isolated” refers to a nucleic acid that has been isolated or purified from its natural environment (e.g., from a cell, cell organelle, or cytoplasm), recombinantly produced, amplified, or synthesized. In embodiments, an isolated nucleic acid includes a nucleic acid contained within a vector.

[0047] As used herein, the term “wild-type” or “non-mutant” form of a gene refers to a nucleic acid that encodes a protein associated with normal or non-pathogenic activity (e.g., a protein lacking a mutation, such as a repeat region expansion that results in higher risk of developing, onset, or progression of a neurodegenerative disease).

[0048] As used herein, the term “mutation” refers to any change in the structure of a gene, e.g., gene sequence, resulting in an altered form of the gene, which may be passed onto subsequent generations (hereditary mutation) or not (somatic mutation). Gene mutations include the substitution, insertion, or deletion of a single base in DNA or the substitution, insertion, deletion, or rearrangement of multiple bases or larger sections of genes or chromosomes, including repeat expansions.

[0049] As used herein, the term “inhibitory nucleic acid” refers to a nucleic acid that comprises a guide strand sequence that hybridizes to at least a portion of a target nucleic acid, e.g., target RNA, mRNA, or pre-mRNA, and inhibits its expression or activity. An inhibitory nucleic acid may target a protein coding region (e.g., exon) or non-coding region (e.g., 5′UTR, 3′UTR, intron, etc.) of a target nucleic acid. In some embodiments, an inhibitory nucleic acid is a single stranded or double stranded molecule. An inhibitory nucleic acid may further comprise a passenger strand sequence on a separate strand (e.g., double stranded duplex) or in the same strand (e.g., single stranded, self-annealing duplex structure). In some embodiments, an inhibitory nucleic acid is an RNA molecule, such as a siRNA, shRNA, pri-miRNA, pre-miRNA, or miRNA. In some embodiments, an inhibitory nucleic acid is double-stranded RNA (dsRNA), such as a pri-miRNA, pre-miRNA, miRNA, or shRNA.

[0050] As used herein, a “microRNA” or “miRNA” refers to a small non-coding RNA molecule capable of mediating silencing of a target gene by cleavage of the target mRNA, translational repression of the target mRNA, target mRNA degradation, or a combination thereof. Typically, miRNA is transcribed as a hairpin or stem-loop (e.g., having a self-complementary, single-stranded backbone) duplex structure, referred to as a primary miRNA (pri-miRNA), which is enzymatically processed (e.g., by Drosha, DGCR8, Pasha, etc.) into a pre-miRNA. Pre-miRNA is exported into the cytoplasm, where it is enzymatically processed by Dicer to produce a miRNA duplex with the passenger strand and then a single-stranded mature miRNA molecule, which is subsequently loaded into the RNA-induced silencing complex (RISC). Reference to a miRNA may include synthetic or artificial miRNAs.

[0051] As used herein, a “synthetic miRNA” or “artificial miRNA” or “amiRNA” or “small binding RNA” (sbRNA) refers to an endogenous, modified, or synthetic pri-miRNA or pre-miRNA (e.g., miRNA backbone or scaffold) in which the endogenous miRNA guide sequence and passenger sequence within the stem sequence have been replaced with a heterologous guide sequence and a heterologous passenger sequence that direct highly efficient RNA silencing of the targeted gene (see, e.g., Eamens et al. (2014), Methods Mol. Biol. 1062:211-224). In some embodiments, the nature of the complementarity of the guide and passenger sequences (e.g., number of bases, position of mismatches, types of bulges, etc.) can be similar or different from the nature of complementarity of the guide and passenger sequences in the endogenous miRNA backbone upon which the synthetic miRNA is constructed.

[0052] As used herein, the term “microRNA backbone,” “miR backbone,” “microRNA scaffold,” or “miR scaffold” refers to a pri-miRNA or pre-miRNA scaffold, with the stem sequence replaced by a heterologous RNA of interest, and is capable of producing a functional, mature miRNA that directs RNA silencing at the gene targeted by the miRNA of interest. In some cases, a miR backbone comprises a 5′ flanking region (also referred to herein as a “5′ flanking polynucleotide” or a “5′ leader”), a loop motif region (also referred to herein as a “loop polynucleotide”), and a 3′ flanking region (also referred to herein as a “3′ flanking polynucleotide” or a “3′ trailer”). In some cases, a miR backbone comprises a 5′ flanking region and a 3′ flanking region (and does not include a loop motif region). A miR backbone may be derived completely or partially from a wild type miRNA scaffold or be a completely artificial sequence.

[0053] As used herein, the term “short hairpin RNA” or “shRNA” includes a conventional stem-loop shRNA, which forms a precursor miRNA (pre-miRNA). “shRNA” also includes micro-RNA embedded shRNAs (miRNA-based shRNAs), wherein the guide strand and the passenger strand of the miRNA duplex are incorporated into an existing (or natural) miRNA or into a modified or synthetic (designed) miRNA. When transcribed, a conventional shRNA forms a primary miRNA (pri-miRNA) or a structure very similar to a natural pri-miRNA. The pri-miRNA is subsequently processed by Drosha and its cofactors into pre-miRNA. Therefore, the term “shRNA” includes pri-miRNA molecules and pre-miRNA molecules.

[0054] A “stem-loop structure” refers to a nucleic acid having a secondary structure that includes a region of nucleotides which are known or predicted to form a double strand or self-duplex (stem portion) that is linked on one side by a region of predominantly single-stranded nucleotides (terminal loop portion). The terms “hairpin”, “self-duplex” and “fold-back” structures are also used herein to refer to stem-loop structures. Such structures are well known in the art and the term is used consistently with its known meaning in the art. As is known in the art, the secondary structure does not require exact base-pairing. Thus, the stem can include one or more base mismatches or bulges. Alternatively, the base-pairing can be exact, i.e. not include any mismatches.

[0055] As used herein, the term “guide strand sequence” of an inhibitory nucleic acid refers to a sequence that is substantially complementary (e.g., at least 45%, 50%, 55%, 60%, 65%, 70%, 75%, 80%, 85%, 90%, 95%, or 100% complementary) to a region of about 10-50 nucleotides (e.g., about 15-30, 16-25, 18-23, or 19-22 nucleotides) of the mRNA or pre-mRNA targeted for silencing. The guide sequence is sufficiently complementary to the target mRNA sequence to direct target-specific silencing, e.g., to trigger the destruction of the target mRNA by the RNAi machinery or process or to reduce translation of the target mRNA. In some embodiments, the guide strand sequence refers to the mature guide sequence remaining following cleavage by Dicer.

[0056] As used herein, the term “passenger strand sequence” of an inhibitory nucleic acid refers to a sequence that is homologous to the target mRNA or pre-mRNA, and partially or completely complementary to the guide strand sequence of an inhibitory nucleic acid. The guide strand sequence and passenger strand sequence of an inhibitory nucleic acid are hybridized to form a duplex structure (e.g., forming a double-stranded duplex or single-stranded self-annealing duplex structure). In some embodiments, the guide strand sequence and passenger strand sequence refers to the mature sequences remaining following cleavage by Dicer.

[0057] As used herein, the term “5′ arm” or “5′ stem” refers to a portion of a double stranded RNA (e.g., shRNA, pre-miRNA, pri-mRNA) that comprises the guide strand or passenger strand.

[0058] As used herein, the term “3′ arm” or “3′ stem” refers to a portion of a double stranded RNA that comprises the passenger strand to the 5′ stem's guide strand, or the guide strand to the 5′ stem's passenger strand.

[0059] As used herein, a “duplex,” when used in reference to an inhibitory nucleic acid, refers to two nucleic acid strands (e.g., a guide strand and passenger strand) hybridizing together to form a duplex structure. A duplex may be formed by two separate nucleic acid strands or by a single nucleic acid strand having a region of self-complementarity (e.g., hairpin or stem-loop).

[0060] As used herein, “target nucleic acid” means a nucleic acid molecule to which an antisense compound hybridizes. A target nucleic acid may be a mRNA (target mRNA) or pre-mRNA (target pre-mRNA) encoded by a target gene.

[0061] As used herein, “targeting” or “targeted to” means the association of an antisense compound to a particular target nucleic acid molecule or a particular region of a target nucleic acid molecule. A double-stranded RNA targets a target nucleic acid if it is sufficiently complementary to the target nucleic acid to allow hybridization under physiological conditions.

[0062] As used herein, the term “complementary” refers to the ability of polynucleotides to form base pairs with each other. Base pairs are typically formed by hydrogen bonds between nucleotide subunits in antiparallel polynucleotide strands or a single, self-annealing polynucleotide strand. Complementary polynucleotide strands can form base pairs in the Watson-Crick manner (e.g., A to T, A to U, C to G), or in any other manner that allows for the formation of duplexes. In some embodiments, complementary nucleotides include G and U (wobble base pair). As apparent to skilled persons in the art, when using RNA as opposed to DNA, uracil rather than thymine is the base that is considered to be complementary to adenosine. Furthermore, when a “U” is denoted in the context of the present invention, the ability to substitute a “T” is understood, unless otherwise stated. Complementarity also encompasses Watson-Crick base pairing between non-modified and modified nucleobases (e.g., 5-methyl cytosine substituted for cytosine). Full complementarity, perfect complementarity or 100% complementarity between two polynucleotide strands is where each nucleotide of one polynucleotide strand can form hydrogen bond with a nucleotide unit of a second polynucleotide strand. % complementarity refers to the number of nucleotides of a contiguous nucleotide sequence in a nucleic acid molecule that are complementary to an aligned reference sequence (e.g., a target mRNA, passenger strand), divided by the total number of nucleotides and multiplying by 100. In such an alignment, a nucleobase/nucleotide which does not form a base pair is called a mismatch. Insertions and deletions are not permitted in calculating % complementarity of a contiguous nucleotide sequence. It is understood by skilled persons in the art that in calculating complementarity, chemical modifications to nucleobases are not considered as long as the Watson-Crick base pairing capacity of the nucleobase is retained (e.g., 5-methyl cytosine is considered the same as cytosine for the purpose of calculating % complementarity).

[0063] As used herein, “non-complementary” in reference to nucleobases means a pair of nucleobases that do not form hydrogen bonds with one another.

[0064] As used herein, “mismatch” means a nucleobase of a first oligomeric compound that is not capable of pairing with a nucleobase at a corresponding position of a second oligomeric compound, when the first and second oligomeric compound are aligned. Either or both of the first and second oligomeric compounds may be oligonucleotides. Nucleotides that do not base pair include self-pairing nucleotides (A-A, T-T, U-U, C-C, and G-G), A and C, C and U, C and T, A and G. In some embodiments, a mismatch does not include G-U wobble base pairs.

[0065] The “percent identity” between two or more nucleic acid sequences refers to the proportion of nucleotides of a contiguous nucleotide sequence in a nucleic acid molecule that are shared by a reference sequence (i.e., % identity=number of identical nucleotides/total number of nucleotides in the aligned region (e.g., the contiguous nucleotide sequence)×100). Insertions and deletions are not permitted in the calculation of % identity of a contiguous nucleotide sequence. It is understood by skilled persons in the art that in calculating identity, chemical modifications to nucleobases are not considered as long as the Watson-Crick base pairing capacity of the nucleobase is retained (e.g., 5-methyl cytosine is considered the same as cytosine for the purpose of calculating % identity).

[0066] As used herein, the term “hybridizing” or “hybridizes” refers to two nucleic acid strands forming hydrogen bonds between base pairs on antiparallel strands, thereby forming a duplex. While not limited to a particular mechanism, the most common mechanism of pairing involves hydrogen bonding, which may be Watson-Crick, Hoogsteen or reversed Hoogsteen hydrogen bonding, between complementary nucleobases. The strength of hybridization between two nucleic acid strands may be described by the melting temperature (Tm), defined as at a given ionic strength and pH, the temperature at which 50% of a target sequence hybridizes to a complementary polynucleotide.

[0067] As used herein, “heterologous” refers to a nucleic acid that is not found in a native (naturally occurring) nucleic acid. For example, relative to a component of a microRNA (e.g., a 5′ flanking polynucleotide, a loop polynucleotide, a 3′ flanking polynucleotide) a heterologous guide sequence and a heterologous passenger sequence comprises a nucleotide sequence that is not associated with the microRNA in nature. As used herein, the “guide sequence” is interchangeable with “first strand” (or “targeting strand”, where the “targeting strand” hybridizes to a target RNA) of a double-stranded RNA, regardless of the orientation.

[0068] As used herein, “expression cassette” refers to any type of genetic construct containing a nucleic acid (e.g., transgene) in which part or all of the nucleic acid encoding sequence is capable of being transcribed. In some embodiments, expression includes transcription of the nucleic acid, for example, to generate a biologically-active polypeptide product or inhibitory RNA (e.g., siRNA, shRNA, miRNA) from a transcribed gene. In some embodiments, the transgene is operably linked to expression control sequences.

[0069] As used herein, the term “transgene” refers to an exogenous nucleic acid that has been transferred naturally or by genetic engineering means into another cell and is capable of being transcribed, and optionally translated.

[0070] As used herein, the term “gene expression” refers to the process by which a nucleic acid is transcribed from a nucleic acid molecule, and often, translated into a peptide or protein. The process can include transcription, post-transcriptional control, post-transcriptional modification, translation, post-translational control, post-translational modification, or any combination thereof. Reference to a measurement of “gene expression” may refer to measurement of the product of transcription (e.g., RNA or mRNA), or the product of translation (e.g., peptides or proteins).

[0071] As used herein, the term “inhibit expression of a gene” means to reduce, down-regulate, suppress, block, lower, or stop expression of the gene. The expression product of a gene can be an RNA molecule transcribed from the gene (e.g., an mRNA) or a polypeptide translated from an mRNA transcribed from the gene. A reduction in the level of an mRNA results in a reduction in the level of a polypeptide translated therefrom. In some embodiments, inhibition of expression reduces the level of a polypeptide without substantially affecting production of the encoding mRNA. The level of expression may be determined using standard techniques for measuring mRNA or protein.

[0072] As used herein, “vector” refers to a genetic construct that is capable of transporting a nucleic acid molecule (e.g., transgene encoding inhibitory nucleic acid) between cells and effecting expression of the nucleic acid molecule when operably-linked to suitable expression control sequences. Expression control sequences may include transcription initiation, termination, promoter and enhancer sequences; efficient RNA processing signals such as splicing and polyadenylation (polyA) signals; sequences that stabilize cytoplasmic mRNA; sequences that enhance translation efficiency (i.e., Kozak consensus sequence); sequences that enhance protein stability; and when desired, sequences that enhance secretion of the encoded product. The vector may be a plasmid, phage particle, transposon, cosmid, phagemid, chromosome, artificial chromosome, virus, virion, lipid nanoparticle, etc. Once transformed into a suitable host cell, the vector may replicate and function independently of the host genome, or may, in some instances, integrate into the genome itself.

[0073] As used herein, “host cell” refers to any cell that contains, or is capable of containing a composition of interest, e.g., an inhibitory nucleic acid. In embodiments, a host cell is a mammalian cell, such as a rodent cell (e.g., mouse or rat) or primate cell (e.g., monkey, chimpanzee, or human). In embodiments, a host cell may be in vitro or in vivo. In embodiments, a host cell may be from an established cell line or primary cells. In embodiments, a host cell may be obtained from a patient having or suspected of having a repeat expansion disease or disorder. In embodiments, a host cell is a non-CNS cell, such as a fibroblast. In embodiments, a host cell is a cell of the CNS, such as a neuron, a glial cell, an astrocyte, or a microglial cell.

[0074] As used herein, “expanded repeat containing gene” or “expanded repeat containing RNA” refers to a mutant gene or RNA molecule (e.g., pre-mRNA or mRNA) encoded by the mutant gene having a base sequence that includes a repeat region (e.g., CAG repeat) where the repeat region is expanded beyond a predetermined number or range of base repeats that are typically present in a “normal” expanded repeat containing gene or RNA encoded by the gene. The presence or length of the repeat region may affect normal processing, function or activity of the RNA or encoded protein and cause a “repeat expansion” or “expanded repeat” disease or disorder. Expanded repeats may be unstable (dynamic) mutations that change size in successive generations. An expanded repeat may be a dinucleotide repeat, a trinucleotide repeat, a tetranucleotide repeat, a pentanucleotide repeat, a hexanucleotide repeat, etc. In some embodiments, a repeat is a CAG repeat or polyglutamine. An expanded repeat containing gene or RNA encoded by the expanded repeat containing gene may also be referred to as a “pathologic allele” or “pathogenic allele.” In some embodiments, a pathologic or pathogenic allele of a CAG repeat containing gene or RNA encoded by the gene has ≥30 consecutive CAG repeats.

[0075] A “repeat expansion disease or disorder,” or “expanded repeat disease or disorder,” refers to a disease or disorder caused by the expansion of a base repeat sequence beyond a predetermined number or range of base repeats that are typically present in a “normal” expanded repeat containing gene or RNA encoded by the gene. A repeat expansion disease or disorder may manifest with markedly varied phenotypes depending on the size of the repeat expansion. Repeat expansion diseases or disorders are primarily neurodegenerative diseases. Some repeat expansion diseases are ophthalmologic diseases. In some embodiments, a repeat expansion disease or disorder is a polyglutamine disease.

[0076] As used herein, “neurodegenerative disease” or “neurodegenerative disorder” refers to diseases or disorders that exhibit neural cell death as a pathological state. A neurodegenerative disease may exhibit chronic neurodegeneration, e.g., slow, progressive neural cell death over a period of several years, or acute neurodegeneration, e.g., sudden onset or neural cell death. Examples of chronic, neurodegenerative diseases include Alzheimer's disease, Parkinson's disease, Huntington's disease, spinocerebellar ataxia types 1-8 (SCA1-8), frontotemporal dementia (FTD), and amyotrophic lateral sclerosis (ALS). A neurodegenerative disease may exhibit death of mainly one type of neuron or of multiple types of neurons.

[0077] As used herein, “subject,” “patient,” and “individual” are used interchangeably herein and refer to living organisms (e.g., mammals) selected for treatment or therapy. Examples of subjects include human and non-human mammals, such as primates (monkey, chimpanzee), cows, horses, sheep, dogs, cats, rats, mice, guinea pigs, pigs, and transgenic species thereof.

### A. Double-Stranded RNAs

[0078] The present disclosure provides artificial double stranded RNAs which function as artificial microRNAs or shRNAs. Double stranded RNAs of the disclosure modulate expression of a target RNA (e.g., mRNA or pre-mRNA) transcript. Double stranded RNAs include precursor molecules, which are processed inside the cell prior to modulation. Double stranded RNAs may be encoded in a plasmid, vector, genome, or other nucleic acid expression vector for delivery to a cell.

[0079] In some embodiments, artificial double stranded RNA comprise from 5′ to 3′: (a) a 5′ leader sequence; (b) a 5′ stem comprising or substantially comprising a passenger sequence or a guide sequence; (c) a 5′ linker of 1-6 bases; (d) a terminal loop; (e) a 3′ linker of 1-6 bases; (f) a 3′ stem comprising or substantially comprising: (i) a guide sequence if the 5′ stem comprises or substantially comprises the passenger sequence; or (ii) a passenger sequence if the 5′ stem comprises or substantially comprises the guide sequence; and (g) a 3′ trailer sequence; wherein the guide sequence targets a CAG repeat region of a CAG repeat containing mRNA or pre-mRNA and comprises 1-5 base mismatches relative to the CAG repeat region, wherein the base mismatches are located at positions 8-16 of the guide sequence.

[0080] In some embodiments, the double stranded RNA refers to a single RNA oligonucleotide compound having at least partial self-complementarity to form a stable self-duplex. Unless otherwise specified, numbering of the nucleotide positions in the double-stranded RNA counts from the 5′ to 3′ direction on the single RNA strand. Similarly, unless otherwise specified, nucleotide sequence is read from the 5′ to 3′ direction on the single RNA strand.

[0081] An artificial double stranded RNA of the present disclosure comprises a 5′ leader, also referred to as a 5′ flanking, sequence. The 5′ leader sequence may be derived from or obtained in whole or in part from wild type microRNA sequence or be in whole or in part artificial. In some embodiments, 5′ leader sequence is derived from or obtained in whole or in part from the flanking sequence of a wild type pre-miRNA scaffold or pri-miRNA scaffold.

[0082] The 5′ leader sequence is contiguously linked to the 5′ stem comprising or substantially comprising a passenger or a guide sequence. The 5′ leader sequence may be of any length. In some embodiments, the 5′ leader sequence is about 1 nucleotide to about 1,000 nucleotides in length, about 1 nucleotide to about 900 nucleotides, about 1 nucleotide to about 800 nucleotides, about 1 nucleotide to about 700 nucleotides, about 1 nucleotide to about 600 nucleotides, about 1 nucleotide to about 500 nucleotides, 1 nucleotide to about 400 nucleotides, about 1 nucleotide to about 300 nucleotides, about 1 nucleotide to about 200 nucleotides, about 1 nucleotide to about 100 nucleotides, about 1 nucleotide to about 75 nucleotides about 1 nucleotide to about 50 nucleotides, about 1 nucleotide to about 25 nucleotides, about 1 nucleotide to about 20 nucleotides, about 1 nucleotide to about 15 nucleotides, or about 1 nucleotide to about 10 nucleotides in length.

[0083] In some embodiments, the 5′ leader comprises a 5′ bulge sequence. As used herein, the term “bulge sequence” refers to a region of nucleic acid that is non-complementary to the nucleic acid opposite it in a duplex. For example, a duplex may contain a region of complementary nucleic acids, then a region of non-complementary nucleic acids, followed by a second region of complementary nucleic acids. The regions of complementary nucleic acids will bind to each other, whereas the central non-complementary region will not bind, thereby forming a “bulge.” In some embodiments, the two strands of nucleic acid positioned between the two complementary regions will be of different lengths, thereby forming a “bulge.”

[0084] An artificial double-stranded RNA of the present disclosure comprises a 3′ trailer, also referred to as a 3′ flanking sequence. The 3′ trailer sequence may be derived from or obtained in whole or in part from wild type microRNA sequence or be in whole or in part artificial. In some embodiments, the 3′ trailer sequence is derived from or obtained in whole or in part from the flanking sequence of a wild type pre-miRNA scaffold or pri-miRNA scaffold.

[0085] The 3′ trailer sequence is contiguously linked to the 3′ stem comprising or substantially comprising a guide or a passenger sequence. The 3′ trailer sequence may be of any length. In some embodiments, the 3′ trailer sequence is about 1 nucleotide to about 1,000 nucleotides in length, about 1 nucleotide to about 900 nucleotides, about 1 nucleotide to about 800 nucleotides, about 1 nucleotide to about 700 nucleotides, about 1 nucleotide to about 600 nucleotides, about 1 nucleotide to about 500 nucleotides, 1 nucleotide to about 400 nucleotides, about 1 nucleotide to about 300 nucleotides, about 1 nucleotide to about 200 nucleotides, about 1 nucleotide to about 100 nucleotides, about 1 nucleotide to about 75 nucleotides about 1 nucleotide to about 50 nucleotides, about 1 nucleotide to about 25 nucleotides, about 1 nucleotide to about 20 nucleotides, about 1 nucleotide to about 15 nucleotides, or about 1 nucleotide to about 10 nucleotides in length. In some embodiments, the 3′ trailer comprises a 3′ bulge sequence.

[0086] In some embodiments, the 3′ trailer comprises a polyU (polyuridine) tail. In some embodiments, the 3′ trailer comprises 3-6 uridines, e.g., 3 uridines, 4 uridines, 5 uridines or 6 uridines. In some embodiments, the polyU tail is immediately adjacent to the guide sequence or passenger sequence in the 3′ stem. In some embodiments, artificial double stranded RNA having a 3′ trailer comprising a polyU tail is expressed using a Pol III promoter.

[0087] In some embodiments, the 3′ trailer comprises a polyadenylation (pA) signal sequence. Suitable polyadenylation signals include, but are not limited to, an SV40 late pA signal, a BGH pA signal, and the like. In some embodiments, an artificial double stranded RNA having a 3′ trailer comprising a pA signal sequence is expressed using a Pol II promoter.

[0088] In some embodiments, the 5′ leader sequence and 3′ trailer sequence have the same number of nucleotides. In some embodiments, the 5′ leader sequence and 3′ trailer sequence have different lengths.

[0089] In some embodiments, the 5′ leader sequence and 3′ trailer sequence are obtained or derived from, in whole or in part, the same miRNA scaffold, for example the same wild type pre-miRNA scaffold or the same pri-miRNA scaffold. In some embodiments, the 5′ leader sequence and 3′ trailer sequence are both obtained from or derived from, in whole or in part, the miR-33 scaffold. In some embodiments, the 5′ leader sequence and 3′ trailer sequence are both obtained or derived from, in whole or in part, the pri-miR-33 scaffold. In some embodiments, the 5′ leader sequence and 3′ trailer sequence are both obtained or derived from, in whole or part, the pre-miR-33 scaffold. In some embodiments, the 5′ leader sequence and 3′ trailer sequence are selected from Table E.

[0090] In some embodiments, the 5′ leader sequence is not complementary to the 3′ trailer sequence. In some embodiments, the 5′ leader sequence is partially complementary to the 3′ trailer sequence. In some embodiments, the 5′ leader sequence contains one, two, or more C mismatches to the uridine(s) in the polyU tail in the 3′ trailer sequence (or C-T mismatch for a DNA sequence encoding the double stranded RNA).

[0091] In some embodiments, the 5′ leader and 3′ trailer sequences contain sequences that allow for recognition and cleavage by Drosha. The canonical pathway of miRNA biogenesis in mammals is initiated by the Drosha-DGCR8 (DiGeorge syndrome critical region gene 8) complex (the Microprocessor), which processes long primary miRNAs (pri-miRNAs) into ˜60-nt pre-miRNAs for further processing by Dicer into a duplex ˜22 nt long. In some embodiments, primary miRNA sequences used as, or as part of the 5′ leader sequence and/or 3′ trailer sequence may direct Drosha cleavage of the double-stranded RNA. Methods of using precursor miRNAs as scaffolds for selected expression of guide:passenger duplexes are provided in U.S. Patent Publication No. 2008/0226553 and Liu et al. (2008) Nucleic Acids Res. 36:2811-24, each of which is incorporated by reference in its entirety.

[0092] In some embodiments, the artificial double-stranded RNA is processed by a Drosha independent/Dicer dependent pathway. In some embodiments, splicing, 3′-5′ exoribonuclease, or pol III termination may substitute for Drosha cleavage.

[0093] In some embodiments, the artificial double-stranded RNA is processed by a Drosha dependent/Dicer independent pathway. An example of Drosha dependent/Dicer independent pathway processing is provided by pri-miR-451, which is processed by Drosha, resulting in a pre-miR-451, which is then cleaved by Ago2 (argonaute 2), ac-pre-mir-451, which is further resected by an as yet unknown mechanism to generate mature miR-451.

[0094] In some embodiments, the 5′ leader sequence and/or 3′ trailer sequence comprises or consists of a nucleotide sequence set forth in Table A. In some embodiments, an artificial double-stranded RNA comprises a 5′ leader sequence comprising or consisting of CCGG and a 3′ trailer sequence comprising or consisting of UUUUUG. In some embodiments, an artificial double-stranded RNA comprises a 5′ leader sequence comprising or consisting of CC and a 3′ trailer sequence comprising or consisting of UUUUUG. In some embodiments, an artificial double-stranded RNA comprises a 5′ leader sequence comprising or consisting of GCUG and a 3′ trailer sequence comprising or consisting of ga uuuuug. In some embodiments, an artificial double-stranded RNA comprises a 5′ leader sequence comprising or consisting of SEQ ID NO:7 and a 3′ trailer sequence comprising or consisting of SEQ ID NO:13.

TABLE A
Examples of 5′ Leader and 3′ Trailer Sequences

| 5′ Leader Sequences | | |
|---|---|---|
| Description | Sequence | SEQ ID NO: |
| | CCGG | NA |
| | CC | NA |
| | CACC | NA |
| miR-33 partial (DNA) | GCTG | NA |
| miR-33 partial (RNA) | GCUG | NA |
| miR-33 full (DNA) | tgcacacctcctgggggcagct ctg | 738 |
| miR-33 full (RNA) | ugcacaccuccugggggcagcu cug | 7 |
| 3′ Trailer Sequences | | |
| Description | Sequence | SEQ ID NO: |
| | TTTTTG | NA |
| | UUUUUG | NA |
| miR-33 partial (DNA) | ga tttttg | NA |
| miR-33 partial (RNA) | ga uuuuug | NA |
| miR-33 full (DNA) | gg aggcctgccctgactgcccac tttttg | 12 |
| miR-33 full (RNA) | gg aggccugcccugacugcccac uuuuug | 13 |

[0095] In some embodiments, the 5′ stem (or 5′ arm) of the double stranded RNA comprises a passenger sequence, also sometimes referred to as sense sequence. The passenger sequence has identity to the target mRNA transcript. The passenger sequence may be about 15-30 nucleotides in length, for example, 15, 16, 17, 18, 19, 20, 21, 22, 23, 24, 25, 26, 27, 28, 29 or 30 nucleotides in length. In some embodiments, the passenger sequence may be about 19-24 nucleotides in length.

[0096] In some embodiments, the 3′ stem (or 3′ arm) of the double stranded RNA comprises a guide sequence, also sometimes referred to as antisense sequence. The guide sequence has complementarity to the target mRNA transcript. The guide strand may be about 15-30 nucleotides in length, for example, 15, 16, 17, 18, 19, 20, 21, 22, 23, 24, 25, 26, 27, 28, 29 or 30 nucleotides in length. In some embodiments, the guide sequence may be about 19-24 nucleotides in length.

[0097] In some embodiments, the 5′ stem comprises the guide sequence while the 3′ stem comprises the passenger sequence of the double stranded RNA.

[0098] The guide sequence and passenger sequence have sufficient complementarity to form a double stranded siRNA molecule upon processing in a host cell, which acts as a suitable substrate for the RNA interference machinery such that the guide sequence derived from the 3′ stem (or 5′ stem) is recognized by the RISC complex and targets its specific mRNA transcript. In some embodiments, the guide sequence and passenger sequence have 100% complementarity. In some embodiments, the guide sequence and passenger sequence are substantially complementary to each other, e.g., about 70%, 75%, 80%, 85%, 90%, 95%, or 99% complementary. In some embodiments, the passenger sequence may comprise one to ten or one to five base mismatches or bulges.

[0099] The guide sequence may comprise a seed sequence, which has perfect or near-perfect Watson-Crick complementarity to the target mRNA sequence, located at positions 1-7, 2-7, 1-8, or 2-8, of the guide sequence relative to the first 5′ nucleotide of the guide strand. The seed region is important for efficient gene silencing by double stranded RNAs.

[0100] The guide sequence targets a CAG repeat region of a CAG repeat containing mRNA and comprises 1-5 mismatches relative to the CAG repeat region, wherein the base mismatches are located at positions 8-16 of the guide sequence. A mismatch includes self-pairing nucleotides (A-A, U-U, T-T, C-C, and G-G), A and C pairing, C and U pairing, C and T pairing, and A and G pairing. In some embodiments, the mismatch comprises a purine mismatch, such as introducing an adenosine base into the guide strand.

[0101] In some embodiments, the guide sequence targeting a CAG repeat region comprises about 1-5 base mismatches relative to the CAG repeat region of a CAG repeat containing mRNA. In some embodiments, the guide sequence targeting a CAG repeat region comprises about 1-4 base mismatches, about 1-3 base mismatches, about 1-2 base mismatches, about 2-5 base mismatches, about 3-4 base mismatches, about 3-5 base mismatches, or about 4-5 base mismatches relative to the CAG repeat region of a CAG repeat containing mRNA. In some embodiments, the guide sequence targeting a CAG repeat region comprises about one mismatch, about two mismatches, about three mismatches, about four mismatches, or about five mismatches relative to the CAG repeat region of a CAG repeat containing mRNA.

[0102] In some embodiments, at least one mismatch (1, 2, 3, 4, or 5) relative to the CAG repeat region may be located at positions 8-12 of the guide sequence. In some embodiments, at least one mismatch (1, 2, or 3) relative to the CAG repeat region may be located at positions 9-11 of the guide sequence. In some embodiments, two or more mismatches relative to the CAG repeat region located at positions 8-16 of the guide sequence are contiguous or adjacent to each other. In some embodiments, at least one mismatch relative to the CAG repeat region located at positions 8-16 is not adjacent to another mismatch located at positions 8-16.

[0103] In some embodiments, a single mismatch relative to the CAG repeat region is located at position 8 of the guide sequence. In some embodiments, a single mismatch relative to the CAG repeat region is located at position 9 of the guide sequence. In some embodiments, a single mismatch relative to the CAG repeat region is located at position 10 of the guide sequence. In some embodiments, a single mismatch relative to the CAG repeat region is located at position 11 of the guide sequence.

[0104] In some embodiments, one mismatch relative to the CAG repeat region is located at position 8 of the guide sequence and one mismatch relative to the CAG repeat region is located at any of positions 9-16 of the guide sequence. In some embodiments, one mismatch relative to the CAG repeat region is located at position 9 of the guide sequence and one mismatch relative to the CAG repeat region is located at any of positions 10-16 of the guide sequence. In some embodiments, one mismatch relative to the CAG repeat region is located at position 10 of the guide sequence and one mismatch relative to the CAG repeat region is located at any of positions 11-16 of the guide sequence. In some embodiments, one mismatch relative to the CAG repeat region is located at position 11 of the guide sequence and one mismatch relative to the CAG repeat region is located at any of positions 12-16 of the guide sequence.

[0105] In some embodiments, one mismatch relative to the CAG repeat region is located at position 8 of the guide sequence, one mismatch relative to the CAG repeat region is located at position 9 of the guide sequence, and one mismatch relative to the CAG repeat region is located at any of positions 10-16 of the guide sequence. In some embodiments, one mismatch relative to the CAG repeat region is located at position 9 of the guide sequence, one mismatch relative to the CAG repeat region is located at position 10 of the guide sequence, and one mismatch relative to the CAG repeat region is located at any of positions 11-16 of the guide sequence. In some embodiments, one mismatch relative to the CAG repeat region is located at position 10 of the guide sequence, one mismatch relative to the CAG repeat region is located position 11 of the guide sequence, and one mismatch relative to the CAG repeat region is located at any of positions 12-16 of the guide sequence. In some embodiments, one mismatch relative to the CAG repeat region is located at position 11 of the guide sequence, one mismatch relative to the CAG repeat region is located at position 12 of the guide sequence, and one mismatch relative to the CAG repeat region is located at any of positions 13-16 of the guide sequence.

[0106] In some embodiments, one mismatch relative to the CAG repeat region is located at position 8 of the guide sequence, one mismatch relative to the CAG repeat region is located position 9 of the guide sequence, one mismatch relative to the CAG repeat region is located at any of positions 12-16 of the guide sequence, and one mismatch relative to the CAG repeat region is located at position 14, 15, or 16. In some embodiments, one mismatch relative to the CAG repeat region is located at position 9 of the guide sequence, one mismatch relative to the CAG repeat region is located position 10 of the guide sequence, one mismatch relative to the CAG repeat region is located at any of positions 11-16 of the guide sequence, and one mismatch relative to the CAG repeat region is located at position 15 or 16. In some embodiments, one mismatch relative to the CAG repeat region is located at position 9 of the guide sequence, one mismatch relative to the CAG repeat region is located position 11 of the guide sequence, one mismatch relative to the CAG repeat region is located at any of positions 12-16 of the guide sequence, and one mismatch relative to the CAG repeat region is located at position 13, 14, 15 or 16.

[0107] In some embodiments, in a guide sequence targeting a CAG repeat region in a CAG register, one mismatch relative to the CAG repeat region is located at position 9 of the guide sequence, one mismatch relative to the CAG repeat region is located position 10 of the guide sequence, one mismatch relative to the CAG repeat region is located at position 11 of the guide sequence, one mismatch relative to the CAG repeat region is located at position 15 of the guide sequence, and one mismatch relative to the CAG repeat region is located at position 16 of the guide sequence. In some embodiments, the mismatches at positions 9, 10 and 11 are A, A, and A, respectively, and the mismatches at positions 15 and 16 are AA, AU, UA, or UU.

[0108] In some embodiments, a guide sequence targeting a CAG repeat region in a UGC register comprise one mismatch relative to the CAG repeat region is located at position 9 of the guide sequence, one mismatch relative to the CAG repeat region is located position 10 of the guide sequence, one mismatch relative to the CAG repeat region is located at position 12 of the guide sequence, one mismatch relative to the CAG repeat region is located at position 15 of the guide sequence, and one mismatch relative to the CAG repeat region is located at position 16 of the guide sequence. In some embodiments, the mismatches at positions 9, 10 and 12 are A, C, and A, respectively, and the mismatches at positions 15 and 16 are AA, UA, or UU.

[0109] In some embodiments, a guide sequence targeting a CAG repeat region in a GCU register comprise one mismatch relative to the CAG repeat region is located at position 9 of the guide sequence, one mismatch relative to the CAG repeat region is located position 10 of the guide sequence, one mismatch relative to the CAG repeat region is located at position 11 of the guide sequence, one mismatch relative to the CAG repeat region is located at position 15 of the guide sequence, and one mismatch relative to the CAG repeat region is located at position 16 of the guide sequence. In some embodiments, the mismatches at positions 9, 10 and 11 are A, U, and A, respectively, and the mismatches at positions 15 and 16 are AA or AU.

[0110] In some embodiments, the guide sequence targeting a CAG repeat region comprises or consists of any sequence selected from Tables B1-B2. In some embodiments, a double stranded RNA comprises a guide sequence selected from Tables B1-B2 and a corresponding passenger sequence that is perfectly complementary to the guide sequence or has one to ten or one to five mismatches or bulges compared to the selected guide sequence.

TABLE B1
CAG Repeat Targeting Oligonucleotides

| # | | |
|---|---|---|
| mismatches | Guide sequence (RNA) | SEQ ID NO: # |
| 1 | CUGCUGCUUCUGCUGCUGCUG | SEQ ID NO: 35 |
| | UGCUGCUGUUGCUGCUGCUGC | SEQ ID NO: 36 |
| | GCUGCUGCAGCUGCUGCUGCU | SEQ ID NO: 37 |
| 2 | CUGCUGCUUAUGCUGCUGCUG | SEQ ID NO: 38 |
| | UGCUGCUGUAUCUGCUGCUGC | SEQ ID NO: 39 |
| | CUGCUGCUUCUGAUGCUGCUG | SEQ ID NO: 41 |
| | CUGCUGCUUCUGCGGCUGCUG | SEQ ID NO: 42 |
| 3 | CUGCUGCUAGUACUGCUGCUG | SEQ ID NO: 43 |
| | GCUGCUGCAUAUGCUGCUGCU | SEQ ID NO: 40 |
| | CUGCUGCUAAUACUGCUGCUG | SEQ ID NO: 326 |
| | CUGCUGCUUGCGCUGCUGCUG | SEQ ID NO: 45 |
| | CUGCUGCUAGGGCUGCUGCUG | SEQ ID NO: 46 |
| 4 | CUGCUGCUAAAACUGCUGCUG | SEQ ID NO: 347 |
| | CUGCUGCUAAACCUGCUGCUG | SEQ ID NO: 48 |
| | CUGCUGCUUAAACUGCUGCUG | SEQ ID NO: 49 |
| | CUGCUGCUUAACCUGCUGCUG | SEQ ID NO: 50 |

Nucleotide mismatch(es) in guide sequence relative to the CAG repeat region of a CAG repeat containing mRNA is in bold and underlined.

TABLE B2
CAG Repeat Targeting

| Mismatch position & type | Guide sequence (RNA) | SEQ ID NO: # |
|---|---|---|
| 9: G > U | CUGCUGCUUCUGCUGCUGCUG | SEQ ID NO: 35 |
| 9: G > A | CUGCUGCUACUGCUGCUGCUG | SEQ ID |
| | | NO: 295 |
| 9: G > C | CUGCUGCUCCUGCUGCUGCUG | SEQ ID |
| | | NO: 220 |
| 9: C > A | UGCUGCUGAUGCUGCUGCUGC | SEQ ID |
| | | NO: 221 |
| 9: C > G | UGCUGCUGGUGCUGCUGCUGC | SEQ ID |
| | | NO: 222 |
| 9: U > A | GCUGCUGCAGCUGCUGCUGCU | SEQ ID NO: 37 |
| 9: U > C | GCUGCUGCCGCUGCUGCUGCU | SEQ ID |
| | | NO: 224 |
| 9: U > G | GCUGCUGCGGCUGCUGCUGCU | SEQ ID |
| | | NO: 225 |
| 9: G > U_10: C > A | CAGCAGCAGCAUAAGCAGCAG | SEQ ID NO: 75 |
| 9: G > U_11: U > G | CUGCUGCUUCGGCUGCUGCUG | SEQ ID NO: 76 |
| 9: G > U_12: G > A | CAGCAGCAUCAACAGCAGCGA | SEQ ID NO: 77 |
| 9: G > C_12: G > A | CUGCUGCUCCUACUGCUGCUG | SEQ ID NO: 78 |
| 9: G > A_13: C > G | CUGCUGCUACUGGUGCUGCUG | SEQ ID NO: 40 |
| 9: G > U_13: C > A | CUGCUGCUUCUGAUGCUGCUG | SEQ ID NO: 80 |
| 9: G > A_14: U > G | CUGCUGCUACUGCGGCUGCUG | SEQ ID NO: 81 |
| 9: G > C_14: U > C | CUGCUGCUCCUGCCGCUGCUG | SEQ ID NO: 82 |
| 9: G > U_14: U > C | CUGCUGCUUCUGCCGCUGCUG | SEQ ID NO: 83 |
| 9: G > U_14: U > G | CUGCUGCUUCUGCGGCUGCUG | SEQ ID NO: 41 |
| 9: G > C_15: G > A | CUGCUGCUCCUGCUACUGCUG | SEQ ID NO: 85 |
| 9: G > C_16: C > A | CUGCUGCUCCUGCUGAUGCUG | SEQ ID NO: 86 |
| 9: G > U_16: C > G | CUGCUGCUUCUGCUGGUGCUG | SEQ ID NO: 87 |
| 10: U > C_15: C > A | UGCUGCUGCCGCUGAUGCUGC | SEQ ID NO: 88 |
| 10: U > G_11: G > U | UGCUGCUGCGUCUGCUGCUGC | SEQ ID NO: 89 |
| 10: U > G_12: C > A | UGCUGCUGCGGAUGCUGCUGC | SEQ ID NO: 90 |
| 10: U > G_15: C > A | UGCUGCUGCGGCUGAUGCUGC | SEQ ID NO: 91 |
| 11: G > A_13: U > G | UGCUGCUGCUACGGCUGCUGC | SEQ ID NO: 92 |
| 11: G > A_15: C > A | UGCUGCUGCUACUGAUGCUGC | SEQ ID NO: 93 |
| 11: G > C_12: C > G | UGCUGCUGCUCGUGCUGCUGC | SEQ ID NO: 94 |
| 11: G > C_14: G > A | UGCUGCUGCUCCUACUGCUGC | SEQ ID NO: 95 |
| 11: G > U_12: C > A | UGCUGCUGCUUAUGCUGCUGC | SEQ ID NO: 96 |
| 11: G > U_13: U > G | UGCUGCUGCUUCGGCUGCUGC | SEQ ID NO: 97 |
| 11: G > U_14: G > A | UGCUGCUGCUUCUACUGCUGC | SEQ ID NO: 98 |
| 11: G > U_16: U > G | UGCUGCUGCUUCUGCGGCUGC | SEQ ID NO: 99 |
| 8: G > C_14: G > A | UGCUGCUCCUGCUACUGCUGC | SEQ ID |
| | | NO: 100 |
| 8: G > C_9: C > G | UGCUGCUCGUGCUGCUGCUGC | SEQ ID |
| | | NO: 101 |
| 8: G > U_10: U > G | UGCUGCUUCGGCUGCUGCUGC | SEQ ID |
| | | NO: 102 |
| 8: G > U_12: C > A | UGCUGCUUCUGAUGCUGCUGC | SEQ ID |
| | | NO: 103 |
| 8: G > U_13: U > C | UGCUGCUUCUGCCGCUGCUGC | SEQ ID |
| | | NO: 104 |
| 8: G > U_13: U > G | UGCUGCUUCUGCGGCUGCUGC | SEQ ID |
| | | NO: 105 |
| 8: G > U_9: C > A | UGCUGCUUAUGCUGCUGCUGC | SEQ ID |
| | | NO: 106 |
| 9: C > A 11: G > U | UGCUGCUGAUUCUGCUGCUGC | SEQ ID |
| | | NO: 107 |
| 9: C > A_16: U > C | UGCUGCUGAUGCUGCCGCUGC | SEQ ID |
| | | NO: 108 |
| 9: C > A_10: U > C | UGCUGCUGACGCUGCUGCUGC | SEQ ID |
| | | NO: 109 |
| 10: G > A_14: C > A | GCUGCUGCUACUGAUGCUGCU | SEQ ID |
| | | NO: 110 |
| 10: G > A_14:C > G | GCUGCUGCUACUGGUGCUGCU | SEQ ID |
| | | NO: 111 |
| 10: G > C_11: C > G | GCUGCUGCUCGUGCUGCUGCU | SEQ ID |
| | | NO: 112 |
| 10: G > C_13: G > A | GCUGCUGCUCCUACUGCUGCU | SEQ ID |
| | | NO: 113 |
| 10: G > U_11: C > A | GCUGCUGCUUAUGCUGCUGCU | SEQ ID |
| | | NO: 114 |
| 10: G > U_12: U > G | GCUGCUGCUUCGGCUGCUGCU | SEQ ID |
| | | NO: 115 |
| 10: G > U_14: C > A | GCUGCUGCUUCUGAUGCUGCU | SEQ ID |
| | | NO: 116 |
| 10: G > U_15: U > G | GCUGCUGCUUCUGCGGCUGCU | SEQ ID |
| | | NO: 117 |
| 11: C > A_13: G > A | GCUGCUGCUGAUACUGCUGCU | SEQ ID |
| | | NO: 118 |
| 11: C > A_13: G > C | GCUGCUGCUGAUCCUGCUGCU | SEQ ID |
| | | NO: 119 |
| 11: C > A_13: G > U | GCUGCUGCUGAUUCUGCUGCU | SEQ ID |
| | | NO: 120 |
| 11: C > A_15: U > A | GCUGCUGCUGAUGCAGCUGCU | SEQ ID |
| | | NO: 121 |
| 11: C > A_15: U > C | GCUGCUGCUGAUGCCGCUGCU | SEQ ID |
| | | NO: 122 |
| 11: C > U_14: C > A | GCUGCUGCUGUUGAUGCUGCU | SEQ ID |
| | | NO: 123 |
| 8: C > A_11: C > G | GCUGCUGAUGGUGCUGCUGCU | SEQ ID |
| | | NO: 124 |
| 8: C > A_12: U > G | GCUGCUGAUGCGGCUGCUGCU | SEQ ID |
| | | NO: 125 |
| 8: C > A_15: U > C | GCUGCUGAUGCUGCCGCUGCU | SEQ ID |
| | | NO: 126 |
| 8: C > A_16: G > C | GCUGCUGAUGCUGCUCCUGCU | SEQ ID |
| | | NO: 127 |
| 1_2-8: C > G_16: G > U | GCUGCUGGUGCUGCUUCUGCU | SEQ ID |
| | | NO: 128 |
| 2-9: U > C_14: C > A | GCUGCUGCCGCUGAUGCUGCU | SEQ ID |
| | | NO: 129 |
| 2-9: U > G_11: C > A | GCUGCUGCGGAUGCUGCUGCU | SEQ ID |
| | | NO: 130 |
| 9: U > G_14: C > A | GCUGCUGCGGCUGAUGCUGCU | SEQ ID |
| | | NO: 131 |
| 9: G > U_10: C > A_12: G > U | CUGCUGCUUAUUCUGCUGCUG | SEQ ID |
| | | NO: 132 |
| 9: G > C_10: C > A_13: C > A | CUGCUGCUCAUGAUGCUGCUG | SEQ ID |
| | | NO: 133 |
| 9: G > C_10: C > G_13: C > A | CUGCUGCUCGUGAUGCUGCUG | SEQ ID |
| | | NO: 134 |
| 9: G > C_10: C > G_13: C > G | CUGCUGCUCGUGGUGCUGCUG | SEQ ID |
| | | NO: 135 |
| 9: G > U_10: C > A_13: C > G | CUGCUGCUUAUGGUGCUGCUG | SEQ ID |
| | | NO: 136 |
| 9: G > U_10: C > G_13: C > A | CUGCUGCUUGUGAUGCUGCUG | SEQ ID |
| | | NO: 137 |
| 9: G > U_10: C > G_13: C > G | CUGCUGCUUGUGGUGCUGCUG | SEQ ID |
| | | NO: 138 |
| 9: G > A_10: C > G_14: U > G | CUGCUGCUAGUGCGGCUGCUG | SEQ ID |
| | | NO: 139 |
| 9: G > C_10: C > G_14: U > A | CUGCUGCUCGUGCAGCUGCUG | SEQ ID |
| | | NO: 140 |
| 9: G > C_10: C > G_14: U > G | CUGCUGCUCGUGCGGCUGCUG | SEQ ID |
| | | NO: 141 |
| 9: G > U_10: C > A_14: U > C | CUGCUGCUUAUGCCGCUGCUG | SEQ ID |
| | | NO: 142 |
| 9: G > U_10: C > A_14: U > G | CUGCUGCUUAUGCGGCUGCUG | SEQ ID |
| | | NO: 143 |
| 9: G > C_10: C > A_15: G > U | CUGCUGCUCAUGCUUCUGCUG | SEQ ID |
| | | NO: 144 |
| 9: G > U_10: C > A_15: G > A | CUGCUGCUUAUGCUACUGCUG | SEQ ID |
| | | NO: 145 |
| 9: G > U_10: C > A_15: G > C | CUGCUGCUUAUGCUCCUGCUG | SEQ ID |
| | | NO: 146 |
| 9: G > C_10: C > G_16: C > A | CUGCUGCUCGUGCUGAUGCUG | SEQ ID |
| | | NO: 147 |
| 9: G > C_10: C > G_16: C > G | CUGCUGCUCGUGCUGGUGCUG | SEQ ID |
| | | NO: 148 |
| 9: G > U_10: C > A_16: C > G | CUGCUGCUUAUGCUGGUGCUG | SEQ ID |
| | | NO: 149 |
| 9: G > U_10: C > G_16: C > A | CUGCUGCUUGUGCUGAUGCUG | SEQ ID |
| | | NO: 150 |
| 9: G > A_10: C > A_11: U > A | CUGCUGCUAAAGCUGCUGCUG | SEQ ID |
| | | NO: 325 |
| 9: G > A_10: C > A_11: U > C | CUGCUGCUAACGCUGCUGCUG | SEQ ID |
| | | NO: 152 |
| 9: G > A_10: C > G_11: U > G | CUGCUGCUAGGGCUGCUGCUG | SEQ ID NO: 46 |
| 9: G > C_10: C > A_11: U > C | CUGCUGCUCACGCUGCUGCUG | SEQ ID |
| | | NO: 154 |
| 9: G > C_10: C > G_11: U > C | CUGCUGCUCGCGCUGCUGCUG | SEQ ID |
| | | NO: 155 |
| 9: G > U_10: C > A_11: U > C | CUGCUGCUUACGCUGCUGCUG | SEQ ID |
| | | NO: 156 |
| 9: G > U_10: C > A_11: U > G | CUGCUGCUUAGGCUGCUGCUG | SEQ ID |
| | | NO: 157 |
| 9: G > U_10: C > G_11: U > C | CUGCUGCUUGCGCUGCUGCUG | SEQ ID NO: 45 |
| 9: C > A_10: U > A_14: G > U | UGCUGCUGAAGCUUCUGCUGC | SEQ ID |
| | | NO: 159 |
| 9: C > A_10: U > C_12: C > A | UGCUGCUGACGAUGCUGCUGC | SEQ ID |
| | | NO: 160 |
| 9: C > A_10: U > C_12: C > G | UGCUGCUGACGGUGCUGCUGC | SEQ ID |
| | | NO: 161 |
| 9: C > A_10: U > C_13: U > G | UGCUGCUGACGCGGCUGCUGC | SEQ ID |
| | | NO: 162 |
| 9: C > A_10: U > C_14: G > U | UGCUGCUGACGCUUCUGCUGC | SEQ ID |
| | | NO: 163 |
| 9: C > G_10: U > C_14: G > C | UGCUGCUGGCGCUCCUGCUGC | SEQ ID |
| | | NO: 164 |
| 9: U > A_10: G > C_14: C > G | GCUGCUGCACCUGGUGCUGCU | SEQ ID |
| | | NO: 165 |
| 9: U > G_10: G > A_14: C > A | GCUGCUGCGACUGAUGCUGCU | SEQ ID |
| | | NO: 166 |
| 9: U > G_10: G > A_16: G > U | GCUGCUGCGACUGCUUCUGCU | SEQ ID |
| | | NO: 167 |
| 9: U > G_10: G > C_11: C > A | GCUGCUGCGCAUGCUGCUGCU | SEQ ID |
| | | NO: 168 |
| 9: U > G_10: G > C_11: C > G | GCUGCUGCGCGUGCUGCUGCU | SEQ ID |
| | | NO: 169 |
| 9: U > G_10: G > C_14: C > A | GCUGCUGCGCCUGAUGCUGCU | SEQ ID |
| | | NO: 170 |
| 9: U > G_10: G > C_14: C > G | GCUGCUGCGCCUGGUGCUGCU | SEQ ID |
| | | NO: 171 |
| 9: U > G_10: G > U_11: C > A | GCUGCUGCGUAUGCUGCUGCU | SEQ ID |
| | | NO: 172 |
| 9: U > G_10: G > U_13: G > U | GCUGCUGCGUCUUCUGCUGCU | SEQ ID |
| | | NO: 173 |
| 9: U > G_10: G > U_14: C > A | GCUGCUGCGUCUGAUGCUGCU | SEQ ID |
| | | NO: 174 |
| 9: U > G_10: G > U_14: C > G | GCUGCUGCGUCUGGUGCUGCU | SEQ ID |
| | | NO: 175 |
| 9: U > G_10: G > U_15: U > A | GCUGCUGCGUCUGCAGCUGCU | SEQ ID |
| | | NO: 176 |
| 9: U > A_10: G > U_11: C > A | GCUGCUGCAUAUGCUGCUGCU | SEQ ID NO: 43 |
| 9: G > A_10: C > G_12: | CUGCUGCUAGUCCUUCUGCUG | SEQ ID |
| G > C_15: G > U | | NO: 178 |
| 9: G > C_10: C > A_12: | CUGCUGCUCAUUCUACUGCUG | SEQ ID |
| G > U_15: G > A | | NO: 179 |
| 9: G > C_10: C > G_12: | CUGCUGCUCGUACUGAUGCUG | SEQ ID |
| G > A_16: C > A | | NO: 180 |
| 9: G > C_10: C > G_12: | CUGCUGCUCGUUCUGGUGCUG | SEQ ID |
| G > U_16: C > G | | NO: 181 |
| 9: G > A_10: C > G_13: | CUGCUGCUAGUGAUCCUGCUG | SEQ ID |
| C > A_15: G > C | | NO: 182 |
| 9: G > A_10: C > G_13: | CUGCUGCUAGUGGUUCUGCUG | SEQ ID |
| C > G_15: G > U | | NO: 183 |
| 9: G > A_10: C > A_14: | CUGCUGCUAAUGCGUCUGCUG | SEQ ID |
| U > G_15: G > U | | NO: 184 |
| 9: G > C_10: C > A_14: | CUGCUGCUCAUGCGUCUGCUG | SEQ ID |
| U > G_15: G > U | | NO: 185 |
| 9: G > C_10: C > G_14: | CUGCUGCUCGUGCGCCUGCUG | SEQ ID |
| U > G_15: G > C | | NO: 186 |
| 9: G > C_10: C > G_14: | CUGCUGCUCGUGCGUCUGCUG | SEQ ID |
| U > G_15: G > U | | NO: 187 |
| 9: G > U_10: C > A_14: | CUGCUGCUUAUGCGUCUGCUG | SEQ ID |
| U > G_15: G > U | | NO: 188 |
| 9: G > A_10: C > A_14: | CUGCUGCUAAUGCGGUUGCUG | SEQ ID |
| U > G_16: C > U | | NO: 189 |
| 9: G > C_10: C > G_14: | CUGCUGCUCGUGCAGAUGCUG | SEQ ID |
| U > A_16: C > A | | NO: 190 |
| 9: G > C_10: C > G_14: | CUGCUGCUCGUGCGGAUGCUG | SEQ ID |
| U > G_16: C > A | | NO: 191 |
| 9: G > A_10: C > G_15: | CUGCUGCUAGUGCUUAUGCUG | SEQ ID |
| G > U_16: C > A | | NO: 192 |
| 9: G > C_10: C > G_15: | CUGCUGCUCGUGCUCAUGCUG | SEQ ID |
| G > C_16: C > A | | NO: 193 |
| 9: G > C_10: C > G_15: | CUGCUGCUCGUGCUUAUGCUG | SEQ ID |
| G > U_16: C > A | | NO: 194 |
| 9: G > A_10: C > A_11: | CUGCUGCUAAGGCUCCUGCUG | SEQ ID |
| U > G_15: G > C | | NO: 195 |
| 9: G > U_10: C > A_11: | CUGCUGCUUAGGCUCCUGCUG | SEQ ID |
| U > G_15: G > C | | NO: 196 |
| 9: G > A_10: C > A_11: | CUGCUGCUAACGCUGUUGCUG | SEQ ID |
| U > C_16: C > U | | NO: 197 |
| 9: G > A_10: C > G_11: | CUGCUGCUAGCGCUGUUGCUG | SEQ ID |
| U > C_16: C > U | | NO: 198 |
| 9: G > U_10: C > A_11: | CUGCUGCUUAGGCUGUUGCUG | SEQ ID |
| U > G_16: C > U | | NO: 199 |
| 9: C > A_10: U > C_14: | UGCUGCUGACGCUUUUGCUGC | SEQ ID |
| G > U_15: C > U | | NO: 200 |
| 9: C > A_10: U > C_14: | UGCUGCUGACGCUUCGGCUGC | SEQ ID |
| G > U_16: U > G | | NO: 201 |
| 9: C > G_10: U > C_14: | UGCUGCUGGCGCUUUUGCUGC | SEQ ID |
| G > U_15: C > U | | NO: 202 |
| 9: C > U_10: U > C_14: | UGCUGCUGUCGCUUCGGCUGC | SEQ ID |
| G > U_16: U > G | | NO: 203 |
| 9: U > A_10: G > U_11: | GCUGCUGCAUAUACUGCUGCU | SEQ ID |
| C > A_13: G > A | | NO: 204 |
| 9: U > G_10: G > C_11: | GCUGCUGCGCAUGCUUCUGCU | SEQ ID |
| C > A_16: G > U | | NO: 205 |
| 9: U > G_10: G > C_11: | GCUGCUGCGCGUGAUGCUGCU | SEQ ID |
| C > G_14: C > A | | NO: 206 |
| 9: U > G_10: G > C_11: | GCUGCUGCGCGUGCUUCUGCU | SEQ ID |
| C > G_16: G > U | | NO: 207 |
| 9: U > G_10: G > U_11: | GCUGCUGCGUAUGCCGCUGCU | SEQ ID |
| C > A_15: U > C | | NO: 208 |
| 9: U > G_10: G > U_11: | GCUGCUGCGUAUGCUUCUGCU | SEQ ID |
| C > A_16: G > U | | NO: 209 |
| 9: G > A_10: C > A_11: | CUGCUGCUAAAGCUAAUGCUG | SEQ ID |
| U > A_15: G > A_16: C > A | | NO: 210 |
| 9: G > A_10: C > A_11: | CUGCUGCUAAAGCUAUUGCUG | SEQ ID |
| U > A_15: G > A_16: C > U | | NO: 211 |
| 9: G > A_10: C > A_11: | CUGCUGCUAAAGCUUAUGCUG | SEQ ID |
| U > A_15: G > U_16: C > A | | NO: 212 |
| 9: G > A_10:C > A_11: | CUGCUGCUAAAGCUUUUGCUG | SEQ ID |
| U > A_15: G > U_16: C > U | | NO: 213 |
| 9:C > A_10: U > C_12: | UGCUGCUGACGAUGAAGCUGC | SEQ ID |
| C > A_15: C > A 16: U > A | | NO: 214 |
| 9: C > A_10:U > C_12: | UGCUGCUGACGAUGUAGCUGC | SEQ ID |
| C > A_15: C > U_16: U > A | | NO: 215 |
| 9: U > A_10: G > U_11: | GCUGCUGCAUAUGCAACUGCU | SEQ ID |
| C > A_15: U > A_16: G > A | | NO: 216 |
| 9: U > A_10: G > U_11: | | SEQ ID |
| C > A_15: U > A_16: G > U | GCUGCUGCAUAUGCAUCUGCU | NO: 217 |

[0111] In some embodiments, specificity or selectivity of a guide sequence targeting a CAG repeat region of a CAG repeat containing mRNA or pre-mRNA increases with the number of base mismatches relative to the CAG repeat region, wherein the base mismatches are located at positions 8-16 of the guide sequence. Specificity (or off-target activity) of a guide sequence may be determined by detecting potential off-target matches in the human unspliced transcriptome (Ensembl database, release 100). For example, for a 21mer guide sequence targeting CAG repeat having perfect complementarity to CAG repeat (or AGC or GCA if using guide sequence targeting the repeat in a different register) in seed sequence (nucleotides 1-7 from 5′ end) and mismatch at position 8, 9, 10, or 11 of the guide sequence; the following steps may be used to measure off-target activity: measure frequency of off-target genes with perfect matches to the guide sequence; measure frequency of off-target genes with perfect 17mer match to guide sequence within positions 1-21; measure frequency of off-target genes matching the guide sequence having 0, 1, 2, 3, or 4 mismatches between positions 8 and 21 inclusive. Off-target frequencies of perfect matches, perfect 17mer match over positions 1-21, matches to guide with 0 mismatch, matches to guide with 1 mismatch, off-target match to guide with 2 mismatches, off-target match to guide with 3 mismatches, off-target match to guide with 4 mismatches may be tallied.

[0112] In some embodiments, specificity of a guide sequence targeting a CAG repeat region of a CAG repeat containing mRNA or pre-mRNA increases with 2-5 base mismatches relative to the CAG repeat region, wherein the base mismatches are located at positions 8-16 of the guide sequence. In some embodiments, specificity of a guide sequence targeting a CAG repeat region of a CAG repeat containing mRNA or pre-mRNA increases with 3-5 base mismatches relative to the CAG repeat region, wherein the base mismatches are located at positions 8-16 of the guide sequence.

[0113] In some embodiments, a guide sequence targeting a CAG repeat region of a CAG repeat containing mRNA or pre-mRNA having 1, 2, 3, 4, or 5 base mismatches relative to the CAG repeat region, wherein the base mismatches are located at positions 8-16 of the guide sequence, has 0 predicted perfectly matching off-target transcripts.

[0114] In some embodiments, a guide sequence targeting a CAG repeat region of a CAG repeat containing mRNA or pre-mRNA having 1, 2, 3, 4, or 5 base mismatches relative to the CAG repeat region, wherein the base mismatches are located at positions 8-16 of the guide sequence, 0-1 predicted off-target transcripts having perfect 17mer match within positions 1-21.

[0115] In some embodiments, a guide sequence targeting a CAG repeat region of a CAG repeat containing mRNA or pre-mRNA having 1, 2, 3, 4, or 5 base mismatches relative to the CAG repeat region, wherein the base mismatches are located at positions 8-16 of the guide sequence, 0-2 predicted off-target transcripts with one mismatch.

[0116] In some embodiments, a guide sequence targeting a CAG repeat region of a CAG repeat containing mRNA or pre-mRNA having 1, 2, 3, 4, or 5 base mismatches relative to the CAG repeat region, wherein the base mismatches are located at positions 8-16 of the guide sequence, 0-2 predicted off-target transcripts having perfect 17mer match within positions 1-21.

[0117] In some embodiments, a guide sequence targeting a CAG repeat region of a CAG repeat containing mRNA or pre-mRNA having 1, 2, 3, 4, or 5 base mismatches relative to the CAG repeat region, wherein the base mismatches are located at positions 8-16 of the guide sequence, 0-66 predicted off-target transcripts with one mismatch.

TABLE B3
Predicted Off-Target Profile of CAG Repeat Targeting Oligonucleotide

| | | | Frequency | | | | | |
|---|---|---|---|---|---|---|---|---|
| | | | perfect | | | | | |
| | | | 17 mer | off- | off- | off- | off- | off- |
| | | | match | target | target | target | target | target |
| Mismatch | | SEQ | within | genes | genes | genes | genes | genes |
| position & | | ID | positions | w/ 0 | w/ 1 | w/ 2 | w/ 3 | w/ 4 |
| type | sequence (5′-3′) | NO: | 1-21 | mm | mm | mm | mm | mm |
| 9: G > U_10: U > G | CAGCAGCAGCAUAAGC | 75 | 0 | 0 | 4 | 219 | 490 | 1233 |
| | AGCAG | | | | | | | |
| 9: G > U_11: U > G | CUGCUGCUUCGGCUGC | 76 | 0 | 0 | 5 | 229 | 512 | 1300 |
| | UGCUG | | | | | | | |
| 9: G > U_12: G > A | CAGCAGCAGUAGAAGC | 741 | 1 | 0 | 14 | 224 | 500 | 1316 |
| | AGCAG | | | | | | | |
| 9: G > C_12: G > A | CUGCUGCUCCUACUGC | 78 | 1 | 0 | 16 | 219 | 540 | 1353 |
| | UGCUG | | | | | | | |
| 9: G > A_13: C > G | CUGCUGCUACUGGUGC | 79 | 1 | 0 | 15 | 217 | 517 | 1272 |
| | UGCUG | | | | | | | |
| 9: G > U_13: C > A | CUGCUGCUUCUGAUGC | 40 | 0 | 0 | 3 | 221 | 523 | 1367 |
| | UGCUG | | | | | | | |
| 9: G > A_14: U > G | CUGCUGCUACUGCGGC | 81 | 1 | 0 | 16 | 214 | 504 | 1197 |
| | UGCUG | | | | | | | |
| 9: G > C_14: U > C | CUGCUGCUCCUGCCGC | 82 | 1 | 0 | 19 | 233 | 621 | 1585 |
| | UGCUG | | | | | | | |
| 9: G > U_14: U > C | CUGCUGCUUCUGCCGC | 83 | 1 | 0 | 17 | 228 | 589 | 1447 |
| | UGCUG | | | | | | | |
| 9: G > U_14: U > G | CUGCUGCUUCUGCGGC | 41 | 0 | 0 | 4 | 221 | 507 | 1301 |
| | UGCUG | | | | | | | |
| 9: G > C_15: G > A | CUGCUGCUCCUGCUAC | 85 | 0 | 0 | 18 | 211 | 557 | 1471 |
| | UGCUG | | | | | | | |
| 9: G > C_16: C > A | CUGCUGCUCCUGCUGA | 86 | 1 | 0 | 5 | 210 | 525 | 1333 |
| | UGCUG | | | | | | | |
| 9: G > U_16: C > G | CUGCUGCUUCUGCUGG | 87 | 1 | 0 | 3 | 221 | 552 | 1531 |
| | UGCUG | | | | | | | |
| 9: G > U_10: C > A_ | CUGCUGCUUAUUCUGC | 132 | 0 | 0 | 0 | 11 | 280 | 875 |
| 12: G > U | UGCUG | | | | | | | |
| 9: G > C_10: C > A_ | CUGCUGCUCAUGAUGC | 133 | 0 | 0 | 0 | 10 | 266 | 928 |
| 13: C > A | UGCUG | | | | | | | |
| 9: G > C_10: C > G_ | CUGCUGCUCGUGAUGC | 134 | 0 | 0 | 0 | 11 | 256 | 832 |
| 13: C > A | UGCUG | | | | | | | |
| 9: G > C_10: C > G_ | CUGCUGCUCGUGGUGC | 135 | 0 | 0 | 0 | 11 | 274 | 869 |
| 13: C > G | UGCUG | | | | | | | |
| 9: G > U_10: C > A_ | CUGCUGCUUAUGGUGC | 136 | C | 0 | 0 | 8 | 295 | 792 |
| 13: C > G | UGCUG | | | | | | | |
| 9: G > U_10: C > G_ | CUGCUGCUUGUGAUGC | 137 | 0 | 0 | 0 | 13 | 286 | 970 |
| 13: C > A | UGCUG | | | | | | | |
| 9: G > U_10: C > G_ | CUGCUGCUUGUGGUGC | 138 | 0 | 0 | 0 | 14 | 314 | 929 |
| 13: C > G | UGCUG | | | | | | | |
| 9: G > A_10: C > G_ | CUGCUGCUAGUGCGGC | 139 | 0 | 0 | 1 | 20 | 273 | 752 |
| 14: U > G | UGCUG | | | | | | | |
| 9: G > C_10: C > G_ | CUGCUGCUCGUGCAGC | 140 | 0 | 0 | 0 | 13 | 317 | 967 |
| 14: U > A | UGCUG | | | | | | | |
| 9: G > C_10: C > G_ | CUGCUGCUCGUGCGGC | 141 | 0 | 0 | 0 | 15 | 260 | 809 |
| 14: U > G | UGCUG | | | | | | | |
| 9: G > U_10: C > A_ | CUGCUGCUUAUGCCGC | 142 | 0 | 0 | 0 | 20 | 280 | 807 |
| 14: U > C | UGCUG | | | | | | | |
| 9: G > U_10: C > A_ | CUGCUGCUUAUGCGGC | 143 | 0 | 0 | 0 | 8 | 265 | 712 |
| 14: U > G | UGCUG | | | | | | | |
| 9: G > C_10: C > A_ | CUGCUGCUCAUGCUUC | 144 | 0 | 0 | 0 | 14 | 283 | 961 |
| 15: G > U | UGCUG | | | | | | | |
| 9: G > U_10: C > A_ | CUGCUGCUUAUGCUAC | 145 | 0 | 0 | 2 | 20 | 265 | 781 |
| 15: G > A | UGCUG | | | | | | | |
| 9: G > U_10: C > A_ | CUGCUGCUUAUGCUCC | 146 | 0 | 0 | 1 | 14 | 279 | 843 |
| 15: G > C | UGCUG | | | | | | | |
| 9: G > C_10: C > G_ | CUGCUGCUCGUGCUGA | 147 | 0 | 0 | 0 | 11 | 271 | 803 |
| 16: C > A | UGCUG | | | | | | | |
| 9: G > C_10: C > G_ | CUGCUGCUCGUGCUGG | 148 | 0 | 0 | 0 | 16 | 290 | 879 |
| 16: C > G | UGCUG | | | | | | | |
| 9: G > U_10: C > A_ | CUGCUGCUUAUGCUGG | 149 | 0 | 0 | 0 | 10 | 299 | 864 |
| 16: C > G | UGCUG | | | | | | | |
| 9: G > U_10: C > G_ | CUGCUGCUUGUGCUGA | 150 | 0 | 0 | 0 | 13 | 295 | 884 |
| 16: C > A | UGCUG | | | | | | | |
| 9: G > A_10: C > A_ | CUGCUGCUAAAGCUGC | 325 | 1 | 0 | 0 | 32 | 303 | 996 |
| 11: U > A | UGCUG | | | | | | | |
| 9: G > A_10: C > A_ | CUGCUGCUAACGCUGC | 152 | 1 | 0 | 1 | 34 | 315 | 845 |
| 11: U > C | UGCUG | | | | | | | |
| 9: G > A_10: C > G_ | CUGCUGCUAGGGCUGC | 46 | 0 | 0 | 2 | 31 | 339 | 1005 |
| 11: U > G | UGCUG | | | | | | | |
| 9: G > C_10: C > A_ | CUGCUGCUCACGCUGC | 154 | 1 | 0 | 0 | 37 | 332 | 1043 |
| 11: U > C | UGCUG | | | | | | | |
| 9: G > C_10: C > G_ | CUGCUGCUCGCGCUGC | 155 | 1 | 0 | 1 | 39 | 319 | 983 |
| 11: U > C | UGCUG | | | | | | | |
| 9: G > U_10: C > A_ | CUGCUGCUUACGCUGC | 156 | 0 | 0 | 1 | 21 | 310 | 883 |
| 11: U > C | UGCUG | | | | | | | |
| 9: G > U_10: C > A_ | CUGCUGCUUAGGCUGC | 157 | 1 | 0 | 0 | 21 | 326 | 999 |
| 11: U > G | UGCUG | | | | | | | |
| 9: G > U_10: C > G_ | CUGCUGCUUGCGCUGC | 45 | 0 | 0 | 3 | 32 | 325 | 1007 |
| 11: U > C | UGCUG | | | | | | | |
| 9: G > A_10: C > G_ | CUGCUGCUAGUCCUUC | 178 | 0 | 0 | 0 | 0 | 62 | 582 |
| 12: G > C_15: G > U | UGCUG | | | | | | | |
| 9: G > C_10: C > A_ | CUGCUGCUCAUUCUAC | 179 | 0 | 0 | 0 | 0 | 63 | 600 |
| 12: G > U_15: G > A | UGCUG | | | | | | | |
| 9: G > C_10: C > G_ | CUGCUGCUCGUACUGA | 180 | 0 | 0 | 0 | 0 | 47 | 456 |
| 12: G > A_16: C > A | UGCUG | | | | | | | |
| 9: G > C_10: C > G_ | CUGCUGCUCGUUCUGG | 181 | 0 | 0 | 0 | 0 | 51 | 519 |
| 12: G > U_16: C > G | UGCUG | | | | | | | |
| 9: G > A 10:C > G_ | CUGCUGCUAGUGAUCC | 182 | 0 | 0 | 0 | 0 | 47 | 544 |
| 13: C > A_15: G > C | UGCUG | | | | | | | |
| 9: G > A_10: C > G_ | CUGCUGCUAGUGGUUC | 183 | 0 | 0 | 0 | 0 | 58 | 547 |
| 13: C > G_15: G > U | UGCUG | | | | | | | |
| 9: G > A_10: C > A_ | CUGCUGCUAAUGCGUC | 184 | 0 | 0 | 0 | 0 | 39 | 429 |
| 14: U > G_15: G > U | UGCUG | | | | | | | |
| 9: G > C_10: C > A_ | CUGCUGCUCAUGCGUC | 185 | 0 | 0 | 0 | 0 | 32 | 506 |
| 14: U > G_15: G > U | UGCUG | | | | | | | |
| 9: G > C_10: C > G_ | CUGCUGCUCGUGCGCC | 186 | 0 | 0 | 0 | 0 | 50 | 504 |
| 14: U > G_15: G > C | UGCUG | | | | | | | |
| 9: G > C_10: C > G_ | CUGCUGCUCGUGCGUC | 187 | 0 | 0 | 0 | 0 | 28 | 464 |
| 14: U > G_15: G > U | UGCUG | | | | | | | |
| 9: G > U_10: C > A_ | CUGCUGCUUAUGCGUC | 188 | 0 | 0 | 0 | 0 | 27 | 464 |
| 14: U > G_15: G > U | UGCUG | | | | | | | |
| 9: G > A_10: C > A_ | CUGCUGCUAAUGCGGU | 189 | 0 | 0 | 0 | 0 | 79 | 446 |
| 14: U > G_16: C > U | UGCUG | | | | | | | |
| 9: G > C_10: C > G_ | CUGCUGCUCGUGCAGA | 190 | 0 | 0 | 0 | 0 | 50 | 662 |
| 14: U > A_16: C > A | UGCUG | | | | | | | |
| 9: G > C_10: C > G_ | CUGCUGCUCGUGCGGA | 191 | 0 | 0 | 0 | 0 | 27 | 408 |
| 14: U > G_16: C > A | UGCUG | | | | | | | |
| 9: G > A_10: C > G_ | CUGCUGCUAGUGCUUA | 192 | 0 | 0 | 0 | 0 | 40 | 447 |
| 15: G > U_16: C > A | UGCUG | | | | | | | |
| 9: G > C_10: C > G_ | CUGCUGCUCGUGCUCA | 193 | 0 | 0 | 0 | 0 | 47 | 516 |
| 15: G > C_16: C > A | UGCUG | | | | | | | |
| 9: G > C_10: C > G_ | CUGCUGCUCGUGCUUA | 194 | 0 | 0 | 0 | 0 | 27 | 429 |
| 15: G > U_16: C > A | UGCUG | | | | | | | |
| 9: G > A_10: C > A_ | CUGCUGCUAAGGCUCC | 195 | 0 | 0 | 0 | 1 | 77 | 616 |
| 11: U > G_15: G > C | UGCUG | | | | | | | |
| 9: G > U_10: C > A_ | CUGCUGCUUAGGCUCC | 196 | 0 | 0 | 0 | 1 | 68 | 664 |
| 11: U > G_15: G > C | UGCUG | | | | | | | |
| 9: G > A_10: C > A_ | CUGCUGCUAACGCUGU | 197 | 0 | 0 | 0 | 1 | 101 | 511 |
| 11: U > C_16: C > U | UGCUG | | | | | | | |
| 9: G > A_10: C > G_ | CUGCUGCUAGCGCUGU | 198 | 0 | 0 | 0 | 1 | 109 | 501 |
| 11: U > C_16: C > U | UGCUG | | | | | | | |
| 9: G > U_10: C > A_ | CUGCUGCUUAGGCUGU | 199 | 0 | 0 | 0 | 1 | 103 | 642 |
| 11: U > G_16: C > U | UGCUG | | | | | | | |
| 9: G > A_10: C > A_ | CUGCUGCUAAAGCUAA | 210 | NA | NA | NA | NA | NA | NA |
| 11: U > A_15: G > A_ | UGCUG | | | | | | | |
| 16: C > A | | | | | | | | |
| 9: G > A_10: C > A_ | CUGCUGCUAAAGCUAU | 211 | NA | NA | NA | NA | NA | NA |
| 11: U > A_15: G > A_ | UGCUG | | | | | | | |
| 16: C > U | | | | | | | | |
| 9: G > A_10: C > A_ | CUGCUGCUAAAGCUUA | 212 | NA | NA | NA | NA | NA | NA |
| 11: U > A_15: G > U_ | UGCUG | | | | | | | |
| 16: C > A | | | | | | | | |
| 9:G > A_10: C > A_ | CUGCUGCUAAAGCUUU | 213 | NA | NA | NA | NA | NA | NA |
| 11: U > A_15: G > U_ | UGCUG | | | | | | | |
| 16: C > U | | | | | | | | |
| 10: U > C_15: C > A | UGCUGCUGCCGCUGAU | 88 | 0 | 0 | 11 | 237 | 520 | 1235 |
| | GCUGC | | | | | | | |
| 10: U > G_11: G > U | UGCUGCUGCGUCUGCU | 89 | 0 | 0 | 2 | 239 | 509 | 1339 |
| | GCUGC | | | | | | | |
| 10: U > G_12: C > A | UGCUGCUGCGGAUGCU | 90 | 0 | 0 | 4 | 232 | 502 | 1188 |
| | GCUGC | | | | | | | |
| 10: U > G_15: C > A | UGCUGCUGCGGCUGAU | 91 | 0 | 0 | 1 | 240 | 475 | 1131 |
| | GCUGC | | | | | | | |
| 11: G > A_13: U > G | UGCUGCUGCUACGGCU | 92 | 0 | 0 | 14 | 226 | 519 | 1150 |
| | GCUGC | | | | | | | |
| 11: G > A_15: C > A | UGCUGCUGCUACUGAU | 93 | 0 | 0 | 11 | 229 | 485 | 1132 |
| | GCUGC | | | | | | | |
| 11: G > C_12: C > G | UGCUGCUGCUCGUGCU | 94 | 0 | 0 | 6 | 224 | 487 | 1171 |
| | GCUGC | | | | | | | |
| 11: G > C_14: G > A | UGCUGCUGCUCCUACU | 95 | 0 | 0 | 22 | 218 | 519 | 1349 |
| | GCUGC | | | | | | | |
| 11: G > U_12: C > A | UGCUGCUGCUUAUGCU | 96 | 0 | 0 | 4 | 215 | 474 | 1122 |
| | GCUGC | | | | | | | |
| 11: G > U_13: U > G | UGCUGCUGCUUCGGCU | 97 | 0 | 0 | 4 | 223 | 501 | 1269 |
| | GCUGC | | | | | | | |
| 11: G > U_14: G > A | UGCUGCUGCUUCUACU | 98 | 0 | 0 | 20 | 215 | 505 | 1346 |
| | GCUGC | | | | | | | |
| 11: G > U_16: U > G | UGCUGCUGCUUCUGCG | 99 | 0 | 0 | 2 | 211 | 519 | 1293 |
| | GCUGC | | | | | | | |
| 8: G > C_14: G > A | UGCUGCUCCUGCUACU | 100 | 0 | 0 | 19 | 216 | 545 | 1387 |
| | GCUGC | | | | | | | |
| 8: G > C_9: C > G | UGCUGCUCGUGCUGCU | 101 | 0 | 0 | 3 | 224 | 485 | 1241 |
| | GCUGC | | | | | | | |
| 8: G > U_10: U > G | UGCUGCUUCGGCUGCU | 102 | 0 | 0 | 4 | 228 | 500 | 1231 |
| | GCUGC | | | | | | | |
| 8: G > U_12: C > A | UGCUGCUUCUGAUGCU | 103 | 0 | 0 | 5 | 218 | 498 | 1204 |
| | GCUGC | | | | | | | |
| 8: G > U_13: U > C | UGCUGCUUCUGCCGCU | 104 | 0 | 0 | 20 | 232 | 557 | 1405 |
| | GCUGC | | | | | | | |
| 8: G > U_13: U > G | UGCUGCUUCUGCGGCU | 105 | 0 | 0 | 7 | 218 | 508 | 1244 |
| | GCUGC | | | | | | | |
| 8: G > U_9: C > A | UGCUGCUUAUGCUGCU | 106 | 0 | 0 | 9 | 215 | 473 | 1216 |
| | GCUGC | | | | | | | |
| 9: C > A 11: G > U | UGCUGCUGAUUCUGCU | 107 | 0 | 0 | 7 | 228 | 476 | 1256 |
| | GCUGC | | | | | | | |
| 9: C > A_16: U > C | UGCUGCUGAUGCUGCC | 108 | 0 | 0 | 20 | 241 | 573 | 1318 |
| | GCUGC | | | | | | | |
| 9: C > A_10: U > C | UGCUGCUGACGCUGCU | 109 | 3 | 0 | 14 | 241 | 543 | 1441 |
| | GCUGC | | | | | | | |
| 9: C > A_10: U > A_ | UGCUGCUGAAGCUUCU | 159 | 0 | 0 | 0 | 25 | 301 | 1043 |
| 14: G > U | GCUGC | | | | | | | |
| 9: C > A_10: U > C_ | UGCUGCUGACGAUGCU | 160 | 0 | 0 | 0 | 16 | 287 | 812 |
| 12: C > A | GCUGC | | | | | | | |
| 9: C > A_10: U > C_ | UGCUGCUGACGGUGCU | 161 | 0 | 0 | 0 | 25 | 291 | 854 |
| 12: C > G | GCUGC | | | | | | | |
| 9: C > A_10: U > C_ | UGCUGCUGACGCGGCU | 162 | 0 | 0 | 0 | 27 | 301 | 854 |
| 13: U > G | GCUGC | | | | | | | |
| 9: C > A_10: U > C_ | UGCUGCUGACGCUUCU | 163 | 0 | 0 | 0 | 20 | 280 | 845 |
| 14: G > U | GCUGC | | | | | | | |
| 9: C > G_10: U > C_ | UGCUGCUGGCGCUCCU | 164 | 0 | 0 | 0 | 24 | 322 | 972 |
| 14: G > C | GCUGC | | | | | | | |
| 9: C > A_10: U > C_ | UGCUGCUGACGCUUUU | 200 | 0 | 0 | 0 | 0 | 102 | 504 |
| 14: G > U_15: C > U | GCUGC | | | | | | | |
| 9: C > A_10: U > C_ | UGCUGCUGACGCUUCG | 201 | 0 | 0 | 0 | 0 | 46 | 476 |
| 14: G > U_16: U > G | GCUGC | | | | | | | |
| 9: C > G_10: U > C_ | UGCUGCUGGCGCUUUU | 202 | 0 | 0 | 0 | 0 | 98 | 519 |
| 14: G > U_15: C > U | GCUGC | | | | | | | |
| 9: C > U_10: U > C_ | UGCUGCUGUCGCUUCG | 203 | 0 | 0 | 0 | 0 | 97 | 524 |
| 14: G > U_16: U > G | GCUGC | | | | | | | |
| 9: C > A_10: U > C_ | UGCUGCUGACGAUGAA | 214 | NA | NA | NA | NA | NA | NA |
| 12: C > A_15: C > A_ | GCUGC | | | | | | | |
| 16: U > A | | | | | | | | |
| 9: C > A_10: U > C_ | UGCUGCUGACGAUGUA | 215 | NA | NA | NA | NA | NA | NA |
| 12: C > A_15: C > U_ | GCUGC | | | | | | | |
| 16: U > A | | | | | | | | |
| 10: G > A_14: C > A | GCUGCUGCUACUGAUG | 110 | 0 | 0 | 13 | 230 | 484 | 1137 |
| | CUGCU | | | | | | | |
| 10: G > A_14: C > G | GCUGCUGCUACUGGUG | 111 | 0 | 0 | 15 | 228 | 505 | 1190 |
| | CUGCU | | | | | | | |
| 10: G > C_11: C > G | GCUGCUGCUCGUGCUG | 112 | 0 | 0 | 2 | 237 | 515 | 1207 |
| | CUGCU | | | | | | | |
| 10: G > C_13: G > A | GCUGCUGCUCCUACUG | 113 | 0 | 0 | 17 | 236 | 543 | 1307 |
| | CUGCU | | | | | | | |
| 10: G > U_11: C > A | GCUGCUGCUUAUGCUG | 114 | 0 | 0 | 5 | 226 | 483 | 1239 |
| | CUGCU | | | | | | | |
| 10: G > U_12: U > G | GCUGCUGCUUCGGCUG | 115 | 0 | 0 | 7 | 236 | 505 | 1267 |
| | CUGCU | | | | | | | |
| 10: G > U_14: C > A | GCUGCUGCUUCUGAUG | 116 | 0 | 0 | 3 | 227 | 474 | 1228 |
| | CUGCU | | | | | | | |
| 10: G > U_15: U > G | GCUGCUGCUUCUGCGG | 117 | 0 | 0 | 4 | 225 | 503 | 1250 |
| | CUGCU | | | | | | | |
| 11: C > A_13: G > A | GCUGCUGCUGAUACUG | 118 | 0 | 0 | 17 | 236 | 541 | 1362 |
| | CUGCU | | | | | | | |
| 11: C > A_13: G > C | GCUGCUGCUGAUCCUG | 119 | 0 | 0 | 3 | 234 | 495 | 1358 |
| | CUGCU | | | | | | | |
| 11: C > A_13: G > U | GCUGCUGCUGAUUCUG | 120 | 0 | 0 | 4 | 232 | 513 | 1308 |
| | CUGCU | | | | | | | |
| 11: C > A_15: U > A | GCUGCUGCUGAUGCAG | 121 | 0 | 0 | 5 | 235 | 542 | 1418 |
| | CUGCU | | | | | | | |
| 11: C > A_15: U > C | GCUGCUGCUGAUGCCG | 122 | 0 | 0 | 13 | 247 | 540 | 1356 |
| | CUGCU | | | | | | | |
| 11: C > U_14: C > A | GCUGCUGCUGUUGAUG | 123 | 0 | 0 | 44 | 253 | 528 | 1283 |
| | CUGCU | | | | | | | |
| 8: C > A_11: C > G | GCUGCUGAUGGUGCUG | 124 | 0 | 0 | 6 | 227 | 507 | 1219 |
| | CUGCU | | | | | | | |
| 8: C > A_12: U > G | GCUGCUGAUGCGGCUG | 125 | 0 | 0 | 8 | 241 | 478 | 1215 |
| | CUGCU | | | | | | | |
| 8: C > A_15: U > C | GCUGCUGAUGCUGCCG | 126 | 0 | 0 | 16 | 255 | 537 | 1260 |
| | CUGCU | | | | | | | |
| 8: C > A_16: G > C | GCUGCUGAUGCUGCUC | 127 | 0 | 0 | 6 | 238 | 500 | 1260 |
| | CUGCU | | | | | | | |
| 8: C > G_16: G > U | GCUGCUGGUGCUGCUU | 128 | 0 | 0 | 8 | 232 | 507 | 1335 |
| | CUGCU | | | | | | | |
| 9: U > C_14: C > A | GCUGCUGCCGCUGAUG | 129 | 0 | 0 | 11 | 246 | 504 | 1182 |
| | CUGCU | | | | | | | |
| 9: U > G_11: C > A | GCUGCUGCGGAUGCUG | 130 | 0 | 0 | 6 | 235 | 517 | 1267 |
| | CUGCU | | | | | | | |
| 9: U > G_14: C > A | GCUGCUGCGGCUGAUG | 131 | 0 | 0 | 4 | 236 | 488 | 1132 |
| | CUGCU | | | | | | | |
| 9: U > A_10: G > C_ | GCUGCUGCACCUGGUG | 165 | 0 | 0 | 0 | 15 | 317 | 976 |
| 14: C > G | CUGCU | | | | | | | |
| 9: U > G_10: G > A_ | GCUGCUGCGACUGAUG | 166 | 0 | 0 | 0 | 20 | 306 | 801 |
| 14: C > A | CUGCU | | | | | | | |
| 9: U > G_10: G > A_ | GCUGCUGCGACUGCUU | 167 | 0 | 0 | 0 | 20 | 308 | 844 |
| 16: G > U | CUGCU | | | | | | | |
| 9: U > G_10: G > C_ | GCUGCUGCGCAUGCUG | 168 | 0 | 0 | 0 | 13 | 298 | 869 |
| 11: C > A | CUGCU | | | | | | | |
| 9: U > G_10: G > C_ | GCUGCUGCGCGUGCUG | 169 | 0 | 0 | 0 | 16 | 307 | 815 |
| 11: C > G | CUGCU | | | | | | | |
| 9: U > G_10: G > C_ | GCUGCUGCGCCUGAUG | 170 | 0 | 0 | 0 | 11 | 293 | 755 |
| 14: C > A | CUGCU | | | | | | | |
| 9: U > G_10: G > C_ | GCUGCUGCGCCUGGUG | 171 | 0 | 0 | 0 | 17 | 310 | 909 |
| 14: C > G | CUGCU | | | | | | | |
| 9: U > G_10: G > U_ | GCUGCUGCGUAUGCUG | 172 | 0 | 0 | 0 | 13 | 282 | 784 |
| 11: C > A | CUGCU | | | | | | | |
| 9: U > G_10: G > U_ | GCUGCUGCGUCUUCUG | 173 | 0 | 0 | 1 | 13 | 293 | 864 |
| 13: G > U | CUGCU | | | | | | | |
| 9: U > G_10: G > U_ | GCUGCUGCGUCUGAUG | 174 | 0 | 0 | 0 | 8 | 276 | 743 |
| 14: C > A | CUGCU | | | | | | | |
| 9: U > G_10: G > U_ | GCUGCUGCGUCUGGUG | 175 | 0 | 0 | 0 | 12 | 288 | 825 |
| 14: C > G | CUGCU | | | | | | | |
| 9: U > G_10: G > U_ | GCUGCUGCGUCUGCAG | 176 | 0 | 0 | 0 | 19 | 326 | 1045 |
| 15: U > A | CUGCU | | | | | | | |
| 9: U > A_10: G > U_ | GCUGCUGCAUAUGCUG | 43 | 0 | 0 | 0 | 23 | 302 | 884 |
| 11: C > A | CUGCU | | | | | | | |
| 9: U > A_10: G > U_ | GCUGCUGCAUAUACUG | 204 | 0 | 0 | 0 | 0 | 69 | 576 |
| 11: C > A_13: G > A | CUGCU | | | | | | | |
| 9: U > G_10: G > C_ | GCUGCUGCGCAUGCUU | 205 | 0 | 0 | 0 | 0 | 37 | 507 |
| 11: C > A_16: G > U | CUGCU | | | | | | | |
| 9: U > G_10: G > C_ | GCUGCUGCGCGUGAUG | 206 | 0 | 0 | 0 | 0 | 33 | 437 |
| 11: C > G_14: C > A | CUGCU | | | | | | | |
| 9: U > G_10: G > C_ | GCUGCUGCGCGUGCUU | 207 | 0 | 0 | 0 | 0 | 33 | 490 |
| 11: C > G_16: G > U | CUGCU | | | | | | | |
| 9: U > G_10: G > U_ | GCUGCUGCGUAUGCCG | 208 | 0 | 0 | 0 | 0 | 45 | 458 |
| 11: C > A_15: U > C | CUGCU | | | | | | | |
| 9: U > G_10: G > U_ | GCUGCUGCGUAUGCUU | 209 | 0 | 0 | 0 | 0 | 30 | 482 |
| 11: C > A_16: G > U | CUGCU | | | | | | | |
| 9: U > A_10: G > U_ | GCUGCUGCAUAUGCAA | 216 | NA | NA | NA | NA | NA | NA |
| 11: C > A_15: U > A_ | CUGCU | | | | | | | |
| 16: G > A | | | | | | | | |
| 9: U > A_10: G > U_ | GCUGCUGCAUAUGCAU | 217 | NA | NA | NA | NA | NA | NA |
| 11: C > A_15: U > A_ | CUGCU | | | | | | | |
| 16: G > U | | | | | | | | |

mm = mismatch

[0118] Table B4 shows exemplary filtering criteria for off-target activity of the guide sequences targeting a CAG repeat region of a CAG repeat containing mRNA or pre-mRNA from Table B3. In some embodiments, specificity of a guide sequence targeting a CAG repeat region of a CAG repeat containing mRNA or pre-mRNA is according to any one of the thresholds set in Table B4, or a combination thereof.

TABLE B4
Filtering Methods for Guide Sequences for Off-Target Activity

| # | | | |
|---|---|---|---|
| Mismatches | CAG registry | UGC registry | GCU registry |
| 1 | No sequences with | One sequence | No sequences |
| | zero perfect | with zero | with zero |
| | match | perfect match | perfect match |
| | | (mm0), but | |
| | | excluded due to | |
| | | 27 perfect 17-mer | |
| | | match within | |
| | | position 1-21 | |
| 2 | 0 perfect match | 0 perfect match | 0 perfect match |
| | 0-1 off targets | 0-1 off targets | 0-1 off targets |
| | with perfect 17- | with perfect 17- | with perfect 17- |
| | mer match within | mer match within | mer match within |
| | position 1-21 | position 1-21 | position 1-21 |
| | Position 9 | Position 9 | Position 9 |
| | mismatch is kept | mismatch is kept | mismatch is kept |
| | static, second | static, second | static, second |
| | mutation is | mutation is | mutation is |
| | introduced | introduced | introduced |
| | anywhere from | anywhere from | anywhere from |
| | position 10 to | position 10 to | position 10 to |
| | 16 | 16 | 16 |
| | Genes checked | Genes checked | Genes checked |
| | only if | only if | only if |
| | expression is in | expression is in | expression is in |
| | brain and within | brain and within | brain and within |
| | Q4 | Q4 | Q4 |
| 3 | 0 perfect match | 0 perfect match | 0 perfect match |
| | 0-1 off targets | 0-1 off targets | 0-1 off targets |
| | with perfect 17- | with perfect 17- | with perfect 17- |
| | mer match within | mer match within | mer match within |
| | position 1-21 | position 1-21 | position 1-21 |
| | Up to 2 off | Up to 2 off | Up to 2 off |
| | targets with 1 | targets with 1 | targets with 1 |
| | mismatch | mismatch | mismatch |
| | Less than 20 off | Less than 40 off | Less than 20 off |
| | target with 2 | target with 2 | target with 2 |
| | mismatches | mismatches | mismatches |
| | | (relaxed filter, | |
| | | due to absence | |
| | | of sequences | |
| | | passing the 20 | |
| | | filter) | |
| | Position 9 and | Position 9 and | Position 9 and |
| | 10 mismatches | 10 mismatches | 10 mismatches |
| | are kept static, | are kept static, | are kept static, |
| | third mutation | third mutation | third mutation |
| | introduced | introduced | introduced |
| | anywhere from | anywhere from | anywhere from |
| | position 11 to | position 11 to | position 11 to |
| | 16 | 16 | 16 |
| | To force | To force | To force |
| | sequences with | sequences with | sequences with |
| | mutations in | mutations in | mutations in |
| | positions 9, 10, | positions 9, 10, | positions 9, 10, |
| | and 11, off | and 11, off | and 11, off |
| | targets with | targets with | targets with |
| | perfect 17-mer | perfect 17-mer | perfect 17-mer |
| | match within | match within | match within |
| | position 1-21 | position 1-21 | position 1-21 |
| | are relaxed to 1 | are relaxed to 1 | are relaxed to 1 |
| | and off target | and off target | and off target |
| | with 2 | with 2 | with 2 |
| | mismatches are | mismatches are | mismatches are |
| | relaxed to 40 | relaxed to 40 | relaxed to 40 |
| | Genes checked | Genes checked | Genes checked |
| | only if | only if | only if |
| | expression is in | expression is in | expression is in |
| | brain and within | brain and within | brain and within |
| | Q4 | Q4 | Q4 |
| 4 | 0 perfect match | 0 perfect match | 0 perfect match |
| | 0 off targets | 0 off targets | 0 off targets |
| | with perfect 17- | with perfect 17- | with perfect 17- |
| | mer match within | mer match within | mer match within |
| | position 1-21 | position 1-21 | position 1-21 |
| | 0 off targets | 0 off targets | 0 off targets |
| | with 1 mismatch | with 1 mismatch | with 1 mismatch |
| | 0-1 off targets | 0-1 off targets | 0-1 off targets |
| | with 2 | with 2 | with 2 |
| | mismatches | mismatches | mismatches |
| | Position 9-10 | Position 9-10 | Position 9-10 |
| | mismatches are | mismatches are | mismatches are |
| | kept static, | kept static, | kept static, |
| | third mutation | third mutation | third mutation |
| | is added | is added | is added |
| | anywhere between | anywhere between | anywhere between |
| | 11-16, fourth | 11-16, fourth | 11-16, fourth |
| | mutation in | mutation in | mutation in |
| | added in | added in | added in |
| | position 15 or | position 15 or | position 15 or |
| | 16 | 16 | 16 |
| | To maintain 9, | Mutations in 9, | To maintain 9, |
| | 10, 11t static, | 10, 11 cannot be | 10, 11t static, |
| | and introduce | kept static | and introduce |
| | fourth mutation | | fourth mutation |
| | in position 15 | | in position 15 |
| | or 16, off | | or 16, off |
| | target for 2 | | target for 2 |
| | mismatches is | | mismatches is |
| | relaxed to 0-1 | | relaxed to 0-1 |
| | Genes checked | Genes checked | Genes checked |
| | only if | only if | only if |
| | expression is in | expression is in | expression is in |
| | brain and within | brain and within | brain and within |
| | Q4 | Q4 | Q4 |

[0119] In some embodiments, a linker is present in the artificial double stranded RNA, joining the stem and the loop of the artificial double stranded RNA. In some embodiments, a 5′ linker joins the 5′ stem and the loop of the artificial double stranded RNA. In some embodiments, a 3′ linker joins the 3′ stem and the loop of the artificial double stranded RNA. In some embodiments, a 5′ linker joins the 5′ stem and the loop of the artificial double stranded RNA, and a 3′ linker joins the 3′ stem and the loop of the artificial double stranded RNA. In some embodiments, the 5′ linker and/or 3′ linker has about 1-6 nucleotides, 1-5 nucleotides, 1-4 nucleotides, 1-3 nucleotides, 1-2 nucleotides, 2-6 nucleotides, 3-6 nucleotides, 4-6 nucleotides, 5-6 nucleotides, 2-5 nucleotides, or 2-4 nucleotides. In some embodiments, the 5′ linker and/or 3′ linker has about 1 nucleotide, 2 nucleotides, 3 nucleotides, 4 nucleotides, 5 nucleotides, or 6 nucleotides. In some embodiments, the 5′ linker the same number of nucleotides as the 3′ linker. In some embodiments, the 5′ linker is 100% complementary to the 3′ linker. In some embodiments, the 5′ linker comprises or consists of the nucleotide sequence CAGC and/or the 3′ linker comprises or consists of the nucleotide sequence of GCUG. In some cases, a sbRNA of the present disclosure does not include linkers.

[0120] In some embodiments, the 5′ linker and 3′ linker each comprise at least 4 nucleotides, optionally wherein at least 75% of the 5′ linker nucleotides are complementary to the 3′ linker nucleotides.

[0121] Examples of 5′ and 3′ linkers are provided in Table C. In some embodiments, a double stranded RNA has a 5′ linker of SEQ ID NO:15 and a 3′ linker of SEQ ID NO:23.

TABLE C
5′ Linkers and 3′ Linkers
5′ Linkers Sequence
T
CAGC
CTGC
CUGC
3′ Linkers Sequence
GCA
GNN
GTG (DNA)
GUG (RNA)
GCTG (DNA)
5′ Linkers Sequence
GCUG (RNA)
GCT (DNA)
GCU (RNA)
GCA (DNA)

[0122] In some embodiments, a terminal loop separates the 5′ linker and the 3′ linker of the artificial double stranded RNA. The terminal loop sequence may be of any length or have about 4 nucleotides to about 1,000 nucleotides, about 4 nucleotides to about 900 nucleotides, about 4 nucleotides to about 800 nucleotides, about 4 nucleotides to about 700 nucleotides, about 4 nucleotides to about 600 nucleotides, about 4 nucleotides to about 500 nucleotides, about 4 nucleotides to about 400 nucleotides, about 4 nucleotides to about 300 nucleotides, about 4 nucleotides to about 200 nucleotides, about 4 nucleotides to about 100 nucleotides, about 4 nucleotides to about 90 nucleotides about 4 nucleotides to about 80 nucleotides, about 4 nucleotides to about 70 nucleotides, about 4 nucleotides to about 50 nucleotides, about 4 nucleotides to about 40 nucleotides, about 4 nucleotides to about 30 nucleotides, about 4 nucleotides to about 20 nucleotides, about 4 nucleotides to about 15 nucleotides, or about 4 nucleotides to about 10 nucleotides. In some embodiments, the terminal loop sequence has about 4 nucleotides, 5 nucleotides, 6 nucleotides, 7, nucleotides, 8 nucleotides, 9 nucleotides, 10 nucleotides, 11 nucleotides, 12, nucleotides, 13 nucleotides, 14 nucleotides, or 15 nucleotides. In some embodiments, the terminal loop comprises a palindromic sequence. In some embodiments, the terminal loop comprises an asymmetric sequence. In some embodiments, the terminal loop comprises or consists of the nucleotide sequence of ACCUGC. Examples of loop sequences are provided in Table D.

TABLE D
Terminal Loop Sequences

| Description | Sequence | SEQ ID NO: |
|---|---|---|
| Palindromic loop (DNA) | CTCGAG | NA |
| Palindromic loop (RNA) | CUCGAG | NA |
| Asymmetric loop (DNA) | ACCTGC | NA |
| Asymmetric loop (RNA) | ACCUGC | NA |
| miR-30 loop (DNA) | Gtgaagccacagatg | SEQ ID NO: 31 |
| miR-30 loop (RNA) | Gugaagccacagaug | SEQ ID NO: 32 |
| miR-33 loop (DNA) | gttctggcaatacct | SEQ ID NO: 33 |
| miR-33 loop (RNA) | guucuggcaauaccu | SEQ ID NO: 34 |

[0123] Additional embodiments of 5′ leader sequences, 3′ trailer sequences, and terminal loop sequences are provided in Table E. In some embodiments, a double stranded RNA is an artificial miRNA comprising from 5′ to 3′: a 5′ leader sequence, a passenger sequence or guide sequence, a terminal loop, a guide sequence or passenger sequence, and a 3′ trailer sequence, wherein the guide sequence targets a CAG repeat region of a CAG repeat containing RNA and comprises 1-5 base mismatches relative to the CAG repeat region, wherein the base mismatches are located at positions 8-16 of the guide sequence. In some embodiments, the 5′ leader sequence, 3′ trailer sequence, and terminal loop of the artificial miRNA are selected from Table E. In some embodiments, the guide sequence is selected from Tables B1-B2.

TABLE E
Exemplary 5′ leader, 3′ trailer, and Terminal Loop Sequences

| | 5′ leader | 3′ trailer | |
|---|---|---|---|
| Description | sequence | sequence | Loop sequence |
| hsa-mir-26a- | GUGGCCUCG | GGGACGC | GUGCAGGUCCCAAU |
| 1 | | | GGG |
| | | | [SEQ ID |
| | | | NO: 274] |
| hsa-mir-26a- | GGCUGUGGCUGGA | UGGAGGCAGCU | GUUUCCAUCUGUGA |
| 2 | [SEQ ID NO: 227] | [SEQ ID NO: 251] | GG |
| | | | [SEQ ID |
| | | | NO: 275] |
| hsa-mir-33a | CUGUG | AG | UGUUCUGGUGGUAC |
| | | | CCAUG |
| | | | [SEQ ID |
| | | | NO: 276] |
| hsa-mir-451a | CUUGGGAAUGGCAAGG | UCUUGCUAUACCCAGA | N/A |
| | [SEQ ID NO: 229] | [SEQ ID NO: 253] | |
| hsa-mir-22 | GGCUGAGCCGCAGU | UGCCCUCUGCC | UGUCCUGACCCAGC |
| | [SEQ ID NO: 230] | [SEQ ID NO: 254] | UA |
| | | | [SEQ ID |
| | | | NO: 277] |
| hsa-mir-375 | CCCC | GGC | GGACCUGAGCGU |
| | | | [SEQ ID |
| | | | NO: 278] |
| hsa-mir-21 | UGUCGGG | CUGACA | CUGUUGAAUCUCAU |
| | | | GG |
| | | | [SEQ ID |
| | | | NO: 279] |
| hsa-mir-99a | CCCAUUGGCAUA | UGUCAGUGUG | GUGAAGUGGACCGC |
| | [SEQ ID NO: 233] | [SEQ ID NO: 257] | A |
| | | | [SEQ ID |
| | | | NO: 280] |
| hsa-mir-199a- | GCCAA | GGC | AGGAGGCUCUCAAU |
| 1 | | | GUGU |
| | | | [SEQ ID |
| | | | NO: 281] |
| hsa-mir-199a- | AGGAAGCUUCUGGAGA | GACUGGGCAAGGGAGAG | AGGACAAUGCCGUU |
| 2 | UCCUGCUCCGUCGC | CA | GU |
| | [SEQ ID NO: 235] | [SEQ ID NO: 259] | [SEQ ID |
| | | | NO: 282] |
| hsa-mir-30a | GCGAC | UGC | CUGUGAAGCCACAG |
| | | | AUGGG |
| | | | [SEQ ID |
| | | | NO: 283] |
| mmu-mir-26a- | AAGGCCGUGGCCUCG | GGGACGCGGGCCUG | GUGCAGGUCCCAAG |
| 1 | [SEQ ID NO: 237] | [SEQ ID NO: 261] | GGG |
| | | | [SEQ ID |
| | | | NO: 284] |
| mmu-mir-26a- | GGCUGCGGCUGGA | UGGAGGCAGCG | GUGUCCGUCCAUGA |
| 2 | [SEQ ID NO: 238] | [SEQ ID NO: 262] | GG |
| | | | [SEQ ID |
| | | | NO: 285] |
| mmu-mir-33 | CUGUG | GG | UGUUCUGGCAAUAC |
| | | | CUGUG |
| | | | [SEQ ID |
| | | | NO: 286] |
| mmu-mir-451a | CUUGGGAAUGGCGAGG | UCUUGCUGCUCCCACA | N/A |
| | [SEQ ID NO: 240] | [SEQ ID NO: 264] | |
| mmu-mir-22 | ACCUGGCUGAGCCGCA | UGCCCUCUGCCCCUGGC | UGUCCUGACCCAGC |
| | GU | [SEQ ID NO: 265] | UA [SEQ ID |
| | [SEQ ID NO: 241] | | NO: 277] |
| mmu-mir-375 | CCCC | GGC | CGGACCUGAGCGU |
| | | | [SEQ ID |
| | | | NO: 287] |
| mmu-mir-21a | UGUACCACCUUGUCGG | UGACAUUUUGGUAUC | CUGUUGAAUCUCAU |
| | A | [SEQ ID NO: 267] | GG |
| | [SEQ ID NO: 243] | | [SEQ ID |
| | | | NO: 279] |
| mmu-mir-99a | CAUA | GUG | GUGAAGUGGACCGC |
| | | | [SEQ ID |
| | | | NO: 289] |
| mmu-mir-99b | GGCACC | UGUC | GGGCCUUCGCCGCA |
| | | | CA |
| | | | [SEQ ID |
| | | | NO: 290] |
| mmu-mir-199a- | GCCAU | GGC | AGGAGGCUGGGACA |
| 1 | | | UGU |
| | | | [SEQ ID |
| | | | NO: 291] |
| mmu-mir-199a- | UGGAAGCUUCAGGAGA | GACUGGGCAAGGGCCAG | AGGACAAUGCCGUU |
| 2 | UCCUGCUCCGUCGC | [SEQ ID NO: 271] | GU |
| | [SEQ ID NO: 247] | | [SEQ ID |
| | | | NO: 292] |
| mmu-mir-30a | GCGAC | UGC | CUGUGAAGCCACAA |
| | | | AUGGG |
| | | | [SEQ ID |
| | | | NO: 282] |
| eSIBR | CTGGAGGCTTGCTTTG | CAGGAAGGACACAAGGC | UUUUGGCCUCUGAC |
| (miR155- | GGCTGTATUGCUG | CCTTTATCAGCACTCAC | UGA |
| based) | [SEQ ID NO: 249] | ATGGAACAAATGGCCAC | [SEQ ID |
| | | CGTGGGAGGATGACAA | NO: 294] |
| | | [SEQ ID NO: 273] | |
| hsa-min-pri- | ACUGUCCUUUU [SEQ | GAAUGGUGGU [SEQ | UGUAUAUCUGAAAG |
| miR101-2 | ID NO: 885] | ID NO: 886] | G [SEQ ID |
| | | | NO: 887] |
| hsa-min-pri- | GUGUUGGGGACUCGCG | ACCCGGCGGGCGCGGCG | CUGUAGCGCAAUU |
| miR203a | CGCUGGGUCC [SEQ | ACAGCGA [SEQ ID | [SEQ ID |
| | ID NO: 888] | NO: 889] | NO: 890] |
| hsa-min-pri- | UGUUUUGAGCGGGGG | UCCUCUCAUUUGCUAUA | UUGUCAUAAACCG |
| miR335 | [SEQ ID NO: 891] | UUCA [SEQ ID | [SEQ ID |
| | | NO: 892] | NO: 893] |
| hsa-min-pri- | CUGACUAUGCCUCCC | GGGUUGUAGUC [SEQ | UAAAGCUGGAGA |
| miR324 | [SEQ ID NO: 894] | ID NO: 895] | [SEQ ID |
| | | | NO: 896] |
| hsa-min-pri- | AGGCCUCGCUGUUCUC | CACGGCGGGGACA | UUCUACUGCUCACU |
| miR135a-1 | [SEQ ID NO: 897] | [SEQ ID NO: 898] | CA [SEQ ID |
| | | | NO: 899] |

In some embodiments, a 5′ leader of Table E is extended at the 5′ terminus with 4 nucleotides and/or the corresponding 3′ trailer of Table E is extended at the 3′ terminus with 4

nucleotides that are non-complementary to the 4 nucleotides of the 5′ terminus of the corresponding 5′ leader sequence for improved processing. In some embodiments, a 5′ leader of Table E is extended at the 5′ terminus with 4 U's and/or the corresponding 3′ trailer of Table E is extended at the 3′ terminus with 4 U's for improved processing.

[0124] It should be understood that the double stranded RNAs of the disclosure comprising guide sequences targeting a CAG repeat region of a CAG repeat containing mRNA, also includes double stranded RNAs comprising guide sequences targeting a different frame, also referred to as register, of the CAG repeat region of the CAG repeat containing mRNA. Thus, targeting CAG repeats includes guide sequence having a +1 shift in frame to target AGC repeats or a +2 shift in frame to target GCA repeats and still target the same CAG repeat containing mRNA transcript.

[0125] In some embodiments, cleavage by Drosha and/or Dicer define the sequence and function of the siRNA produced from the double stranded RNA. In some embodiments, the double stranded RNA is cleaved by Drosha within the 5′ leader sequence and/or the 3′ trailer sequence to produce shRNA comprising the guide sequence and passenger sequence. In some embodiments, the shRNA is cleaved by Dicer to produce siRNA. The siRNA are loaded onto the RNA induced silencing complex (RISC). In some embodiments, the double stranded RNA is a pri-miRNA-like molecule that is cleaved by Drosha to produce pre-miRNA. The pre-miRNA molecule is a shRNA-like molecule that can subsequently be processed by Dicer to result in an siRNA-like duplex. In some embodiments, cleavage of the double stranded RNA is Dicer independent (e.g., cleaved by Ago2). In some embodiments, the shRNA produced from the double stranded RNA has a 5′ overhang and/or 3′ overhang, e.g., 1-6 nucleotides. In some embodiments, the shRNA produced from the double stranded RNA has a 2-3 nucleotide overhang at the 5′ end and/or the 3′ end. In some embodiments, the shRNA produced from the double stranded RNA has a dinucleotide overhang at the 5′ end and/or the 3′ end. In some embodiments, the shRNA produced from the double stranded RNA has about 38 to 300 nucleotides, 38 to 250 nucleotides, 38 to 200 nucleotides, 38 to 150 nucleotides, 38 to 100 nucleotides, 38 to 75 nucleotides or 38 to 50 nucleotides.

[0126] In some embodiments, the siRNA produced or processed from the double stranded RNA in the mammalian cell comprise the 1-5 base mismatches relative to the CAG repeat region at their predicted positions within positions 8-16 of the guide sequence. The presence of the 1-5 base mismatches relative to the CAG repeat region at their predicted positions within positions 8-16 of the guide sequence may be reflective of correct 5′ processing of the guide strand. In some embodiments, the siRNA produced or processed from the double stranded RNA in the mammalian cell and having the 1-5 base mismatches relative to the CAG repeat region at their predicted positions within positions 8-16 of the guide sequence are at an abundance of at least 10%, 15%, 20%, 25%, 30%, 35%, 40%, 45%, 50%, 55%, 60%, 65%, 70%, 75%, 80%, 85%, 90%, 95%, 97%, or 99% or more in the mammalian cell (in vitro or in vivo) compared to other siRNAs produced or processed from the same double stranded RNA.

[0127] The guide strand leads RISC to cognate target mRNAs in a sequence specific manner. In some embodiments, the guide strand induces cleavage of the target mRNA transcript. In some embodiments, the guide strand induces translational repression and/or posterior repression through mRNA decay.

[0128] In some cases, a double-stranded RNA of the present disclosure comprises: a) a first strand that hybridizes to a target CAG repeat region of a CAG repeat-containing RNA; and b) a second strand that hybridizes to the first strand, wherein the first strand comprises: i) a first mismatch to the target CAG repeat region; and ii) at least a second mismatch to the target CAG repeat region, wherein: 1) when the first mismatch is at position 8 based on the numbering of SEQ ID NO:743 (CUGCUGCUGCUGCUGCUGCUG (SEQ ID NO:743)), SEQ ID NO:744 (GCUGCUGCUGCUGCUGCUGCUG (SEQ ID NO:744)), SEQ ID NO:745 (UGCUGCUGCUGCUGCUGCUGCUG (SEQ ID NO:745)), SEQ ID NO:866 (GCUGCUGCUGCUGCUGCUGCU (SEQ ID NO:866)), or SEQ ID NO:867 (UGCUGCUGCUGCUGCUGCUGC (SEQ ID NO:867)), the second mismatch is from is from 1 to 8 bases 3′ of the first mismatch; 2) when the first mismatch is at position 9 based on the numbering of SEQ ID NO:743 (CUGCUGCUGCUGCUGCUGCUG (SEQ ID NO:743)), SEQ ID NO:744 (GCUGCUGCUGCUGCUGCUGCUG (SEQ ID NO:744)), or SEQ ID NO:745 (UGCUGCUGCUGCUGCUGCUGCUG (SEQ ID NO:745), the second mismatch is from 1 to 7 bases 3′ of the first mismatch; 3) when the first mismatch is at position 10 based on the numbering of SEQ ID NO:743 (CUGCUGCUGCUGCUGCUGCUG (SEQ ID NO:743)), SEQ ID NO:744 (GCUGCUGCUGCUGCUGCUGCUG (SEQ ID NO:744)), or (UGCUGCUGCUGCUGCUGCUGCUG (SEQ ID NO:745)), the second mismatch is from 1 to 6 bases 3′ of the first mismatch; and 4) when the first mismatch is at position 11 based on the numbering of SEQ ID NO:743 (CUGCUGCUGCUGCUGCUGCUG (SEQ ID NO:743)), SEQ ID NO:744 (GCUGCUGCUGCUGCUGCUGCUG (SEQ ID NO:744)), or (UGCUGCUGCUGCUGCUGCUGCUG (SEQ ID NO:745)), the second mismatch is from 1 to 5 bases 3′ of the first mismatch. In some cases, the first strand comprises no more than 2 mismatches with the target CAG repeat region. In some cases, the first strand comprises no more than 3 mismatches with the target CAG repeat region. In some cases, the first strand comprises no more than 4 mismatches with the target CAG repeat region. In some cases, the second strand is 100% complementary to the first strand. In some cases, the second strand comprises from 1 to 10 mismatches (e.g., from 1 to 4, from 3 to 5, from 5 to 7, or from 5 to 10 mismatches) to the first strand. In some cases, the second strand comprises from 1 to 4 mismatches to the first strand. In some cases, the second strand comprises no more than 1, 2, 3, or 4 mismatches to the first strand. In some cases, the second strand comprises no more than 1 mismatch to the first strand. In some cases, the second strand comprises no more than 2 mismatches to the first strand. In some cases, the second strand comprises no more than 3 mismatches to the first strand. In some cases, the second strand comprises no more than 4 mismatches to the first strand. In some cases, the second strand comprises no more than 5 mismatches to the first strand. In some cases, the double-stranded RNA has a length of from 18 nucleotides to 25 nucleotides. In some cases, the double-stranded RNA has a length of 20 nucleotides. In some cases, the double-stranded RNA has a length of 21 nucleotides. In some cases, the double-stranded RNA has a length of 22 nucleotides. In some cases, the double-stranded RNA has a length of 23 nucleotides. In some cases, the double-stranded RNA has a length of 24 nucleotides. In some cases, the double-stranded RNA has a length of 25 nucleotides. In some cases, the guide sequence comprises any one of SEQ ID NOs:298-375 (see Table 6; FIG. 22) and has a length of 21 nucleotides. In some cases, each mismatch is generated by substituting a nucleotide (e.g., a nucleotide present in CUGCUGCUGCUGCUGCUGCUG (SEQ ID NO:743), a nucleotide present in GCUGCUGCUGCUGCUGCUGCU (SEQ ID NO:866), or a nucleotide present in UGCUGCUGCUGCUGCUGCUGC (SEQ ID NO:867)) with a different nucleotide. In some cases, each mismatch is generated by a substitution independently selected from: a) a substitution of a G with an A, a U, or a C; b) a substitution of a U with an A, a G, or a C; and c) a substitution of a C with an A, a U, or a G.

### First Mismatch at Position 8; 2 Mismatches

[0129] In some cases, a double-stranded RNA of the present disclosure comprises: a) a first strand that hybridizes to a target CAG repeat region of a CAG repeat-containing RNA; and b) a second strand that hybridizes to the first strand, wherein the first strand comprises: i) a first mismatch to the target CAG repeat region, where the first mismatch is at position 8 based on the numbering of SEQ ID NO:743 (CUGCUGCUGCUGCUGCUGCUG (SEQ ID NO:743)), SEQ ID NO:744 (GCUGCUGCUGCUGCUGCUGCUG (SEQ ID NO:744)), or SEQ ID NO:745 (UGCUGCUGCUGCUGCUGCUGCUG (SEQ ID NO:745); and ii) a second mismatch to the target CAG repeat region, wherein the second mismatch is from 1 to 8 bases 3′ of the first mismatch. In some cases, the first strand is a variant comprising at least a first and a second substitution of the nucleotide sequence: CUGCUGCUGCUGCUGCUGCUG (SEQ ID NO:743) wherein the first substitution generates the first mismatch and is at position 8 based on the numbering of CUGCUGCUGCUGCUGCUGCUG (SEQ ID NO:743) and the second substitution generates the second mismatch and is from 1 to 8 bases 3′ of the first mismatch. In some cases, the first strand is a variant comprising at least a first and a second substitution of the nucleotide sequence: GCUGCUGCUGCUGCUGCUGCU (SEQ ID NO:866), wherein the first substitution generates the first mismatch and is at position 8 based on the numbering of GCUGCUGCUGCUGCUGCUGCU (SEQ ID NO:866), and the second substitution generates the second mismatch and is from 1 to 8 bases 3′ of the first mismatch. In some cases, the first strand is a variant comprising at least a first and a second substitution of the nucleotide sequence: UGCUGCUGCUGCUGCUGCUGC (SEQ ID NO:867), wherein the first substitution generates the first mismatch and is at position 8 based on the numbering of UGCUGCUGCUGCUGCUGCUGC (SEQ ID NO:867), and the second substitution generates the second mismatch and is from 1 to 8 bases 3′ of the first mismatch. In some cases, the first strand comprises no more than 2 mismatches with the target CAG repeat region. In some cases, the first strand comprises no more than 3 mismatches with the target CAG repeat region. In some cases, the first strand comprises no more than 4 mismatches with the target CAG repeat region. In some cases, the second strand is 100% complementary to the first strand. In some cases, the second strand comprises from 1 to 10 mismatches (e.g., from 1 to 4, from 3 to 5, from 5 to 7, or from 5 to 10 mismatches) to the first strand. In some cases, the second strand comprises from 1 to 4 mismatches to the first strand. In some cases, the second strand comprises no more than 1, 2, 3, or 4 mismatches to the first strand. In some cases, the second strand comprises no more than 1 mismatch to the first strand. In some cases, the second strand comprises no more than 2 mismatches to the first strand. In some cases, the second strand comprises no more than 3 mismatches to the first strand. In some cases, the second strand comprises no more than 4 mismatches to the first strand. In some cases, the second strand comprises no more than 5 mismatches to the first strand. In some cases, the double-stranded RNA has a length of from 18 nucleotides to 25 nucleotides. In some cases, the double-stranded RNA has a length of 20 nucleotides. In some cases, the double-stranded RNA has a length of 21 nucleotides. In some cases, the double-stranded RNA has a length of 22 nucleotides. In some cases, the double-stranded RNA has a length of 23 nucleotides. In some cases, the double-stranded RNA has a length of 24 nucleotides. In some cases, the double-stranded RNA has a length of 25 nucleotides. In some cases, each mismatch is generated by a substitution independently selected from: a) a substitution of a G with an A, a U, or a C; b) a substitution of a U with an A, a G, or a C; and c) a substitution of a C with an A, a U, or a G. In some cases, the first strand comprises a nucleotide sequence selected from SEQ ID NOs:317-324. In some cases, the first strand comprises the following nucleotide sequence: CUGCUGCAACUGCUGCUGCUG (SEQ ID NO:317; RNA guide strand sequence of “CUG_NA_B” in Table 6). In some cases, the first strand comprises the following nucleotide sequence: CUGCUGCAGAUGCUGCUGCUG (SEQ ID NO:318; RNA guide strand sequence of “CUG_NA_C” in Table 6). In some cases, the first strand comprises the following nucleotide sequence: CUGCUGCAGCAGCUGCUGCUG (SEQ ID NO:319; RNA guide strand sequence of “CUG_NA_D” in Table 6). In some cases, the first strand comprises the following nucleotide sequence: CUGCUGCAGCUACUGCUGCUG (SEQ ID NO:320; RNA guide strand sequence of “CUG_NA_E” in Table 6). In some cases, the first strand comprises the following nucleotide sequence: CUGCUGCAGCUGAUGCUGCUG (SEQ ID NO:321; RNA guide strand sequence of “CUG_NA_F” in Table 6). In some cases, the first strand comprises the following nucleotide sequence: CUGCUGCAGCUGCAGCUGCUG (SEQ ID NO:322; RNA guide strand sequence of “CUG_NA_G” in Table 6). In some cases, the first strand comprises the following nucleotide sequence: CUGCUGCAGCUGCUACUGCUG (SEQ ID NO:323; RNA guide strand sequence of “CUG_NA_H” in Table 6). In some cases, the first strand comprises the following nucleotide sequence: CUGCUGCAGCUGCUGAUGCUG (SEQ ID NO:324; RNA guide strand sequence of “CUG_NA_I” in Table 6). In some cases, the first strand comprises a nucleotide sequence selected from SEQ ID NOs:804-819 (as depicted in Table 8; FIG. 24).

### First Mismatch at Position 8; 3 Mismatches

[0130] In some cases, a double-stranded RNA of the present disclosure comprises a) a first strand that hybridizes to a target CAG repeat region of a CAG repeat-containing RNA, wherein the first strand comprises a first mismatch to the target CAG repeat region, wherein the first mismatch is at position 8 based on the numbering of SEQ ID NO:743 (CUGCUGCUGCUGCUGCUGCUG (SEQ ID NO:743)), SEQ ID NO:866 (GCUGCUGCUGCUGCUGCUGCU (SEQ ID NO:866)), or SEQ ID NO:867 (UGCUGCUGCUGCUGCUGCUGC (SEQ ID NO:867)); and b) a second strand that hybridizes to the first strand, wherein the first strand comprises a second mismatch and a third mismatch to the target CAG repeat region, and wherein the second and third mismatches are from 1 to 8 bases 3′ of the first mismatch. In some cases, the first strand is a variant comprising at least a first, a second, and a third substitution of the nucleotide sequence CUGCUGCUGCUGCUGCUGCUG (SEQ ID NO:743), wherein the first substitution generates the first mismatch and is at position 8 based on the numbering of CUGCUGCUGCUGCUGCUGCUG (SEQ ID NO:743), wherein the second substitution generates the second mismatch and the third substitution generates the third mismatch, and wherein the second substitution and the third substitution are from 1 to 8 bases 3′ of the first mismatch. In some cases, the first strand is a variant comprising at least a first, a second, and a third substitution of the nucleotide sequence GCUGCUGCUGCUGCUGCUGCU (SEQ ID NO:866), and wherein the first substitution generates the first mismatch and is at position 8 based on the numbering of GCUGCUGCUGCUGCUGCUGCU (SEQ ID NO:866), wherein the second substitution generates the second mismatch and the third substitution generates the third mismatch, and wherein the second substitution and the third substitution are from 1 to 8 bases 3′ of the first mismatch. In some cases, the first strand is a variant comprising at least a first, a second, and a third substitution of the nucleotide sequence UGCUGCUGCUGCUGCUGCUGC (SEQ ID NO:867), and wherein the first substitution generates the first mismatch and is at position 8 based on the numbering of UGCUGCUGCUGCUGCUGCUGC (SEQ ID NO:867), wherein the second substitution generates the second mismatch and the third substitution generates the third mismatch, and wherein the second substitution and the third substitution are from 1 to 8 bases 3′ of the first mismatch. In some cases, the first strand comprises no more than 3 mismatches with the target CAG repeat region. In some cases, the first strand comprises no more than 4 mismatches with the target CAG repeat region. In some cases, the second strand is 100% complementary to the first strand. In some cases, the second strand comprises from 1 to 10 mismatches (e.g., from 1 to 4, from 3 to 5, from 5 to 7, or from 5 to 10 mismatches) to the first strand. In some cases, the second strand comprises from 1 to 4 mismatches to the first strand. In some cases, the second strand comprises no more than 1, 2, 3, or 4 mismatches to the first strand. In some cases, the second strand comprises no more than 1 mismatch to the first strand. In some cases, the second strand comprises no more than 2 mismatches to the first strand. In some cases, the second strand comprises no more than 3 mismatches to the first strand. In some cases, the second strand comprises no more than 4 mismatches to the first strand. In some cases, the second strand comprises no more than 5 mismatches to the first strand. In some cases, the double-stranded RNA has a length of from 18 nucleotides to 25 nucleotides. In some cases, the double-stranded RNA has a length of 20 nucleotides. In some cases, the double-stranded RNA has a length of 21 nucleotides. In some cases, the double-stranded RNA has a length of 22 nucleotides. In some cases, the double-stranded RNA has a length of 23 nucleotides. In some cases, the double-stranded RNA has a length of 24 nucleotides. In some cases, the double-stranded RNA has a length of 25 nucleotides. In some cases, each mismatch is generated by a substitution independently selected from: a) a substitution of a G with an A, a U, or a C; b) a substitution of a U with an A, a G, or a C; and c) a substitution of a C with an A, a U, or a G.

### First Mismatch at Position 8; 4 Mismatches

[0131] In some cases, a double-stranded RNA of the present disclosure comprises a) a first strand that hybridizes to a target CAG repeat region of a CAG repeat-containing RNA, wherein the first strand comprises a first mismatch to the target CAG repeat region, wherein the first mismatch is at position 8 based on the numbering of SEQ ID NO:743 (CUGCUGCUGCUGCUGCUGCUG (SEQ ID NO:743)), SEQ ID NO:867 (GCUGCUGCUGCUGCUGCUGCU (SEQ ID NO:867)), or SEQ ID NO:866 (UGCUGCUGCUGCUGCUGCUGC (SEQ ID NO:866)); and b) a second strand that hybridizes to the first strand, wherein the first strand comprises a second mismatch, a third mismatch, and a fourth mismatch to the target CAG repeat region, and wherein the second, third, and fourth mismatches are from 1 to 8 bases 3′ of the first mismatch. In some cases, the first strand is a variant comprising at least a first, a second, a third, and a fourth substitution of the nucleotide sequence CUGCUGCUGCUGCUGCUGCUG (SEQ ID NO:743), wherein the first substitution generates the first mismatch and is at position 8 based on the numbering of CUGCUGCUGCUGCUGCUGCUG (SEQ ID NO:743), wherein the second substitution generates the second mismatch, the third substitution generates the third mismatch, and the fourth substitution generates the fourth mismatch, and wherein the second, third, and fourth substitutions are from 1 to 8 bases 3′ of the first mismatch. In some cases, the first strand is a variant comprising at least a first, a second, a third, and a fourth substitution of the nucleotide sequence GCUGCUGCUGCUGCUGCUGCU (SEQ ID NO:866), wherein the first substitution generates the first mismatch and is at position 8 based on the numbering of GCUGCUGCUGCUGCUGCUGCU (SEQ ID NO:866), wherein the second substitution generates the second mismatch, the third substitution generates the third mismatch, and the fourth substitution generates the fourth mismatch, and wherein the second, third, and fourth substitutions are from 1 to 8 bases 3′ of the first mismatch. In some cases, the first strand is a variant comprising at least a first, a second, a third, and a fourth substitution of the nucleotide sequence UGCUGCUGCUGCUGCUGCUGC (SEQ ID NO:867), wherein the first substitution generates the first mismatch and is at position 8 based on the numbering of UGCUGCUGCUGCUGCUGCUGC (SEQ ID NO:867), wherein the second substitution generates the second mismatch, the third substitution generates the third mismatch, and the fourth substitution generates the fourth mismatch, and wherein the second, third, and fourth substitutions are from 1 to 8 bases 3′ of the first mismatch. In some cases, the first strand comprises no more than 4 mismatches with the target CAG repeat region. In some cases, the second strand is 100% complementary to the first strand. In some cases, the second strand comprises from 1 to 10 mismatches (e.g., from 1 to 4, from 3 to 5, from 5 to 7, or from 5 to 10 mismatches) to the first strand. In some cases, the second strand comprises from 1 to 4 mismatches to the first strand. In some cases, the second strand comprises no more than 1, 2, 3, or 4 mismatches to the first strand. In some cases, the second strand comprises no more than 1 mismatch to the first strand. In some cases, the second strand comprises no more than 2 mismatches to the first strand. In some cases, the second strand comprises no more than 3 mismatches to the first strand. In some cases, the second strand comprises no more than 4 mismatches to the first strand. In some cases, the second strand comprises no more than 5 mismatches to the first strand. In some cases, the double-stranded RNA has a length of from 18 nucleotides to 25 nucleotides. In some cases, the double-stranded RNA has a length of 20 nucleotides. In some cases, the double-stranded RNA has a length of 21 nucleotides. In some cases, the double-stranded RNA has a length of 22 nucleotides. In some cases, the double-stranded RNA has a length of 23 nucleotides. In some cases, the double-stranded RNA has a length of 24 nucleotides. In some cases, the double-stranded RNA has a length of 25 nucleotides. In some cases, each mismatch is generated by a substitution independently selected from: a) a substitution of a G with an A, a U, or a C; b) a substitution of a U with an A, a G, or a C; and c) a substitution of a C with an A, a U, or a G.

### First Mismatch at Position 9; 2 Mismatches

[0132] In some cases, a double-stranded RNA of the present disclosure comprises: a) a first strand that hybridizes to a target CAG repeat region of a CAG repeat-containing RNA; and b) a second strand that hybridizes to the first strand, wherein the first strand comprises: i) a first mismatch to the target CAG repeat region, where the first mismatch is at position 9 based on the numbering of SEQ ID NO:743 (CUGCUGCUGCUGCUGCUGCUG (SEQ ID NO:743)), SEQ ID NO:744 (GCUGCUGCUGCUGCUGCUGCUG (SEQ ID NO:744)), SEQ ID NO:745 (UGCUGCUGCUGCUGCUGCUGCUG (SEQ ID NO:745), SEQ ID NO:866 (GCUGCUGCUGCUGCUGCUGCU (SEQ ID NO:866)), or SEQ ID NO:867 (UGCUGCUGCUGCUGCUGCUGC (SEQ ID NO:867); and ii) a second mismatch to the target CAG repeat region, wherein the second mismatch is from 1 to 7 bases 3′ of the first mismatch. In some cases, the first strand is a variant comprising at least a first and a second substitution of the nucleotide sequence CUGCUGCUGCUGCUGCUGCUG (SEQ ID NO:743), wherein the first substitution generates the first mismatch and is at position 9 based on the numbering of CUGCUGCUGCUGCUGCUGCUG (SEQ ID NO:743), and the second substitution generates the second mismatch and is from 1 to 7 bases 3′ of the first mismatch. In some cases, the first strand is a variant comprising at least a first and a second substitution of the nucleotide sequence GCUGCUGCUGCUGCUGCUGCU (SEQ ID NO:866), wherein the first substitution generates the first mismatch and is at position 9 based on the numbering of GCUGCUGCUGCUGCUGCUGCU (SEQ ID NO:866), and the second substitution generates the second mismatch and is from 1 to 7 bases 3′ of the first mismatch. In some cases, the first strand is a variant comprising at least a first and a second substitution of the nucleotide sequence UGCUGCUGCUGCUGCUGCUGC (SEQ ID NO:867), wherein the first substitution generates the first mismatch and is at position 9 based on the numbering of UGCUGCUGCUGCUGCUGCUGC (SEQ ID NO:867), and the second substitution generates the second mismatch and is from 1 to 7 bases 3′ of the first mismatch. In some cases, the first strand comprises no more than 2 mismatches with the target CAG repeat region. In some cases, the second strand is 100% complementary to the first strand. In some cases, the second strand comprises from 1 to 10 mismatches (e.g., from 1 to 4, from 3 to 5, from 5 to 7, or from 5 to 10 mismatches) to the first strand. In some cases, the second strand comprises from 1 to 4 mismatches to the first strand. In some cases, the second strand comprises no more than 1, 2, 3, or 4 mismatches to the first strand. In some cases, the second strand comprises no more than 1 mismatch to the first strand. In some cases, the second strand comprises no more than 2 mismatches to the first strand. In some cases, the second strand comprises no more than 3 mismatches to the first strand. In some cases, the second strand comprises no more than 4 mismatches to the first strand. In some cases, the second strand comprises no more than 5 mismatches to the first strand. In some cases, the double-stranded RNA has a length of from 18 nucleotides to 25 nucleotides. In some cases, the double-stranded RNA has a length of 20 nucleotides. In some cases, the double-stranded RNA has a length of 21 nucleotides. In some cases, the double-stranded RNA has a length of 22 nucleotides. In some cases, the double-stranded RNA has a length of 23 nucleotides. In some cases, the double-stranded RNA has a length of 24 nucleotides. In some cases, the double-stranded RNA has a length of 25 nucleotides. In some cases, each mismatch is generated by a substitution independently selected from: a) a substitution of a G with an A, a U, or a C; b) a substitution of a U with an A, a G, or a C; and c) a substitution of a C with an A, a U, or a G. In some cases, the first strand comprises a nucleotide sequence selected from SEQ ID NOs:298-304.

### First Mismatch at Position 9; 3 Mismatches

[0133] In some cases, a double-stranded RNA of the present disclosure comprises: a) a first strand that hybridizes to a target CAG repeat region of a CAG repeat-containing RNA; and b) a second strand that hybridizes to the first strand, where the first mismatch is at position 9 based on the numbering of SEQ ID NO:743 (CUGCUGCUGCUGCUGCUGCUG (SEQ ID NO:743)), SEQ ID NO:744 (GCUGCUGCUGCUGCUGCUGCUG (SEQ ID NO:744)), SEQ ID NO:745 (UGCUGCUGCUGCUGCUGCUGCUG (SEQ ID NO:745), (GCUGCUGCUGCUGCUGCUGCU (SEQ ID NO:866)), or SEQ ID NO:867 (UGCUGCUGCUGCUGCUGCUGC (SEQ ID NO:867), where the first strand comprises a second mismatch and a third mismatch to the target CAG repeat region, and where the second and third mismatches are from 1 to 7 bases 3′ of the first mismatch. In some cases, the first strand is a variant comprising at least a first, a second, and a third substitution of the nucleotide sequence CUGCUGCUGCUGCUGCUGCUG (SEQ ID NO:743), wherein the first substitution generates the first mismatch and is at position 9 based on the numbering of CUGCUGCUGCUGCUGCUGCUG (SEQ ID NO:743), wherein the second substitution generates the second mismatch and the third substitution generates the third mismatch, and wherein the second substitution and the third substitution are from 1 to 7 bases 3′ of the first mismatch. In some cases, the first strand is a variant comprising at least a first, a second, and a third substitution of the nucleotide sequence GCUGCUGCUGCUGCUGCUGCU (SEQ ID NO:866), wherein the first substitution generates the first mismatch and is at position 9 based on the numbering of GCUGCUGCUGCUGCUGCUGCU (SEQ ID NO:866), wherein the second substitution generates the second mismatch and the third substitution generates the third mismatch, and wherein the second substitution and the third substitution are from 1 to 7 bases 3′ of the first mismatch. In some cases, the first strand is a variant comprising at least a first, a second, and a third substitution of the nucleotide sequence UGCUGCUGCUGCUGCUGCUGC (SEQ ID NO:867), wherein the first substitution generates the first mismatch and is at position 9 based on the numbering of UGCUGCUGCUGCUGCUGCUGC (SEQ ID NO:867), wherein the second substitution generates the second mismatch and the third substitution generates the third mismatch, and wherein the second substitution and the third substitution are from 1 to 7 bases 3′ of the first mismatch. In some cases, the first strand comprises no more than 3 mismatches with the target CAG repeat region. In some cases, the first strand comprises no more than 4 mismatches with the target CAG repeat region. In some cases, the second strand is 100% complementary to the first strand. In some cases, the second strand comprises from 1 to 10 mismatches (e.g., from 1 to 4, from 3 to 5, from 5 to 7, or from 5 to 10 mismatches) to the first strand. In some cases, the second strand comprises from 1 to 4 mismatches to the first strand. In some cases, the second strand comprises no more than 1, 2, 3, or 4 mismatches to the first strand. In some cases, the second strand comprises no more than 1 mismatch to the first strand. In some cases, the second strand comprises no more than 2 mismatches to the first strand. In some cases, the second strand comprises no more than 3 mismatches to the first strand. In some cases, the second strand comprises no more than 4 mismatches to the first strand. In some cases, the second strand comprises no more than 5 mismatches to the first strand. In some cases, the double-stranded RNA has a length of from 18 nucleotides to 25 nucleotides. In some cases, the double-stranded RNA has a length of 20 nucleotides. In some cases, the double-stranded RNA has a length of 21 nucleotides. In some cases, the double-stranded RNA has a length of 22 nucleotides. In some cases, the double-stranded RNA has a length of 23 nucleotides. In some cases, the double-stranded RNA has a length of 24 nucleotides. In some cases, the double-stranded RNA has a length of 25 nucleotides. In some cases, each mismatch is generated by a substitution independently selected from: a) a substitution of a G with an A, a U, or a C; b) a substitution of a U with an A, a G, or a C; and c) a substitution of a C with an A, a U, or a G. In some cases, the first strand comprises a nucleotide sequence selected from SEQ ID NOs:325-332 and 336-338. In some cases, the first strand comprises the following nucleotide sequence: CUGCUGCUAAAGCUGCUGCUG (SEQ ID NO:325; RNA guide strand sequence of “CUG_307” in Table 6). In some cases, the first strand comprises the following nucleotide sequence: CUGCUGCUAAUACUGCUGCUG (SEQ ID NO:326; RNA guide strand sequence of “CUG_334” in Table 6). In some cases, the first strand comprises the following nucleotide sequence: CUGCUGCUAAUGAUGCUGCUG (SEQ ID NO:327; RNA guide strand sequence of “CUG_361” in Table 6). In some cases, the first strand comprises the following nucleotide sequence: CUGCUGCUAAUGCAGCUGCUG (SEQ ID NO:328; RNA guide strand sequence of “CUG_388” in Table 6). In some cases, the first strand comprises the following nucleotide sequence: CUGCUGCUAAUGCUACUGCUG (SEQ ID NO:329; RNA guide strand sequence of “CUG_415” in Table 6). In some cases, the first strand comprises the following nucleotide sequence: CUGCUGCUACAGAUGCUGCUG (SEQ ID NO:330; RNA guide strand sequence of “CUG_631” in Table 6). In some cases, the first strand comprises the following nucleotide sequence: CUGCUGCUACAGCAGCUGCUG (SEQ ID NO:331; RNA guide strand sequence of “CUG_658” in Table 6). In some cases, the first strand comprises the following nucleotide sequence: CUGCUGCUACAGCUGAUGCUG (SEQ ID NO:332; RNA guide strand sequence of “CUG_712” in Table 6). In some cases, the first strand comprises the following nucleotide sequence: CUGCUGCUAAUGCUGAUGCUG (SEQ ID NO:336; RNA guide strand sequence of “CUG_442” in Table 6). In some cases, the first strand comprises the following nucleotide sequence: CUGCUGCUACAACUGCUGCUG (SEQ ID NO:337; RNA guide strand sequence of “CUG_604” in Table 6). In some cases, the first strand comprises the following nucleotide sequence: CUGCUGCUACAGCUACUGCUG (SEQ ID NO:338; RNA guide strand sequence of “CUG_685” in Table 6).

### First Mismatch at Position 9; 4 Mismatches

[0134] In some cases, a double-stranded RNA of the present disclosure comprises: a) a first strand that hybridizes to a target CAG repeat region of a CAG repeat-containing RNA; and b) a second strand that hybridizes to the first strand, where the first mismatch is at position 9 based on the numbering of SEQ ID NO:743 (CUGCUGCUGCUGCUGCUGCUG (SEQ ID NO:743)), SEQ ID NO:744 (GCUGCUGCUGCUGCUGCUGCUG (SEQ ID NO:744)), SEQ ID NO:745 (UGCUGCUGCUGCUGCUGCUGCUG (SEQ ID NO:745), (GCUGCUGCUGCUGCUGCUGCU (SEQ ID NO:866)), or SEQ ID NO:867 (UGCUGCUGCUGCUGCUGCUGC (SEQ ID NO:867), wherein the first strand comprises a second mismatch, a third mismatch, and a fourth mismatch to the target CAG repeat region, and wherein the second, third, and fourth mismatches are from 1 to 7 bases 3′ of the first mismatch. In some cases, the first strand is a variant comprising at least a first, a second, a third, and a fourth substitution of the nucleotide sequence CUGCUGCUGCUGCUGCUGCUG (SEQ ID NO:743), wherein the first substitution generates the first mismatch and is at position 9 based on the numbering of CUGCUGCUGCUGCUGCUGCUG (SEQ ID NO:743), wherein the second substitution generates the second mismatch, the third substitution generates the third mismatch, and the fourth substitution generates the fourth mismatch, and wherein the second, third, and fourth substitutions are from 1 to 7 bases 3′ of the first mismatch. In some cases, the first strand is a variant comprising at least a first, a second, a third, and a fourth substitution of the nucleotide sequence GCUGCUGCUGCUGCUGCUGCU (SEQ ID NO:866), wherein the first substitution generates the first mismatch and is at position 9 based on the numbering of GCUGCUGCUGCUGCUGCUGCU (SEQ ID NO:866), wherein the second substitution generates the second mismatch, the third substitution generates the third mismatch, and the fourth substitution generates the fourth mismatch, and wherein the second, third, and fourth substitutions are from 1 to 7 bases 3′ of the first mismatch. In some cases, the first strand is a variant comprising at least a first, a second, a third, and a fourth substitution of the nucleotide sequence UGCUGCUGCUGCUGCUGCUGC (SEQ ID NO:867), wherein the first substitution generates the first mismatch and is at position 9 based on the numbering of UGCUGCUGCUGCUGCUGCUGC (SEQ ID NO:867), wherein the second substitution generates the second mismatch, the third substitution generates the third mismatch, and the fourth substitution generates the fourth mismatch, and wherein the second, third, and fourth substitutions are from 1 to 7 bases 3′ of the first mismatch. In some cases, the first strand comprises no more than 4 mismatches with the target CAG repeat region. In some cases, the second strand is 100% complementary to the first strand. In some cases, the second strand comprises from 1 to 10 mismatches (e.g., from 1 to 4, from 3 to 5, from 5 to 7, or from 5 to 10 mismatches) to the first strand. In some cases, the second strand comprises from 1 to 4 mismatches to the first strand. In some cases, the second strand comprises no more than 1, 2, 3, or 4 mismatches to the first strand. In some cases, the second strand comprises no more than 1 mismatch to the first strand. In some cases, the second strand comprises no more than 2 mismatches to the first strand. In some cases, the second strand comprises no more than 3 mismatches to the first strand. In some cases, the second strand comprises no more than 4 mismatches to the first strand. In some cases, the second strand comprises no more than 5 mismatches to the first strand. In some cases, the double-stranded RNA has a length of from 18 nucleotides to 25 nucleotides. In some cases, the double-stranded RNA has a length of 20 nucleotides. In some cases, the double-stranded RNA has a length of 21 nucleotides. In some cases, the double-stranded RNA has a length of 22 nucleotides. In some cases, the double-stranded RNA has a length of 23 nucleotides. In some cases, the double-stranded RNA has a length of 24 nucleotides. In some cases, the double-stranded RNA has a length of 25 nucleotides. In some cases, each mismatch is generated by a substitution independently selected from: a) a substitution of a G with an A, a U, or a C; b) a substitution of a U with an A, a G, or a C; and c) a substitution of a C with an A, a U, or a G. In some cases, the first strand comprises a nucleotide sequence selected from SEQ ID NOs:341-344 and 347-367.

### First Mismatch at Position 10; 2 Mismatches

[0135] In some cases, a double-stranded RNA of the present disclosure comprises: a) a first strand that hybridizes to a target CAG repeat region of a CAG repeat-containing RNA; and b) a second strand that hybridizes to the first strand, wherein the first strand comprises: i) a first mismatch to the target CAG repeat region, where the first mismatch is at position 10 based on the numbering of SEQ ID NO:743 (CUGCUGCUGCUGCUGCUGCUG (SEQ ID NO:743)), SEQ ID NO:744 (GCUGCUGCUGCUGCUGCUGCUG (SEQ ID NO:744)), SEQ ID NO:745 (UGCUGCUGCUGCUGCUGCUGCUG (SEQ ID NO:745), (GCUGCUGCUGCUGCUGCUGCU (SEQ ID NO:866)), or SEQ ID NO:867 (UGCUGCUGCUGCUGCUGCUGC (SEQ ID NO:867); and ii) a second mismatch to the target CAG repeat region, wherein the second mismatch is from 1 to 6 bases 3′ of the first mismatch. In some cases, the first strand is a variant comprising at least a first and a second substitution of the nucleotide sequence CUGCUGCUGCUGCUGCUGCUG (SEQ ID NO:743), wherein the first substitution generates the first mismatch and is at position 10 based on the numbering of CUGCUGCUGCUGCUGCUGCUG (SEQ ID NO:743), and wherein the second substitution generates the second mismatch and is from 1 to 6 bases 3′ of the first mismatch. In some cases, the first strand is a variant comprising at least a first and a second substitution of the nucleotide sequence GCUGCUGCUGCUGCUGCUGCU (SEQ ID NO:866), wherein the first substitution generates the first mismatch and is at position 10 based on the numbering of GCUGCUGCUGCUGCUGCUGCU (SEQ ID NO:866), and wherein the second substitution generates the second mismatch and is from 1 to 6 bases 3′ of the first mismatch. In some cases, the first strand is a variant comprising at least a first and a second substitution of the nucleotide sequence UGCUGCUGCUGCUGCUGCUGC (SEQ ID NO:867), wherein the first substitution generates the first mismatch and is at position 10 based on the numbering of UGCUGCUGCUGCUGCUGCUGC (SEQ ID NO:867), and wherein the second substitution generates the second mismatch and is from 1 to 6 bases 3′ of the first mismatch. In some cases, the first strand comprises no more than 2 mismatches with the target CAG repeat region. In some cases, the first strand comprises no more than 3 mismatches with the target CAG repeat region. In some cases, the first strand comprises no more than 4 mismatches with the target CAG repeat region. In some cases, the second strand is 100% complementary to the first strand. In some cases, the second strand comprises from 1 to 10 mismatches (e.g., from 1 to 4, from 3 to 5, from 5 to 7, or from 5 to 10 mismatches) to the first strand. In some cases, the second strand comprises from 1 to 4 mismatches to the first strand. In some cases, the second strand comprises no more than 1, 2, 3, or 4 mismatches to the first strand. In some cases, the second strand comprises no more than 1 mismatch to the first strand. In some cases, the second strand comprises no more than 2 mismatches to the first strand. In some cases, the second strand comprises no more than 3 mismatches to the first strand. In some cases, the second strand comprises no more than 4 mismatches to the first strand. In some cases, the second strand comprises no more than 5 mismatches to the first strand. In some cases, the double-stranded RNA has a length of from 18 nucleotides to 25 nucleotides. In some cases, the double-stranded RNA has a length of 20 nucleotides. In some cases, the double-stranded RNA has a length of 21 nucleotides. In some cases, the double-stranded RNA has a length of 22 nucleotides. In some cases, the double-stranded RNA has a length of 23 nucleotides. In some cases, the double-stranded RNA has a length of 24 nucleotides. In some cases, the double-stranded RNA has a length of 25 nucleotides. In some cases, each mismatch is generated by a substitution independently selected from: a) a substitution of a G with an A, a U, or a C; b) a substitution of a U with an A, a G, or a C; and c) a substitution of a C with an A, a U, or a G. In some cases, the first strand comprises a nucleotide sequence selected from SEQ ID NOs:305-310.

### First Mismatch at Position 10; 3 Mismatches

[0136] In some cases, a double-stranded RNA of the present disclosure comprises: a) a first strand that hybridizes to a target CAG repeat region of a CAG repeat-containing RNA; and b) a second strand that hybridizes to the first strand, where the first mismatch is at position 10 based on the numbering of SEQ ID NO:743 (CUGCUGCUGCUGCUGCUGCUG (SEQ ID NO:743)), SEQ ID NO:744 (GCUGCUGCUGCUGCUGCUGCUG (SEQ ID NO:744)), or (UGCUGCUGCUGCUGCUGCUGCUG (SEQ ID NO:745)), where the first strand comprises a second mismatch and a third mismatch to the target CAG repeat region, and where the second and third mismatches are from 1 to 6 bases 3′ of the first mismatch. In some cases, the first strand is a variant comprising at least a first, a second, and a third substitution of the nucleotide sequence CUGCUGCUGCUGCUGCUGCUG (SEQ ID NO:743), wherein the first substitution generates the first mismatch and is at position 10 based on the numbering of CUGCUGCUGCUGCUGCUGCUG (SEQ ID NO:743), wherein the second substitution generates the second mismatch and the third substitution generates the third mismatch, and wherein the second substitution and the third substitution are from 1 to 6 bases 3′ of the first mismatch. In some cases, the first strand is a variant comprising at least a first, a second, and a third substitution of the nucleotide sequence GCUGCUGCUGCUGCUGCUGCU (SEQ ID NO:866), wherein the first substitution generates the first mismatch and is at position 10 based on the numbering of GCUGCUGCUGCUGCUGCUGCU (SEQ ID NO:866), wherein the second substitution generates the second mismatch and the third substitution generates the third mismatch, and wherein the second substitution and the third substitution are from 1 to 6 bases 3′ of the first mismatch. In some cases, the first strand is a variant comprising at least a first, a second, and a third substitution of the nucleotide sequence UGCUGCUGCUGCUGCUGCUGC (SEQ ID NO:867), wherein the first substitution generates the first mismatch and is at position 10 based on the numbering UGCUGCUGCUGCUGCUGCUGC (SEQ ID NO:867), wherein the second substitution generates the second mismatch and the third substitution generates the third mismatch, and wherein the second substitution and the third substitution are from 1 to 6 bases 3′ of the first mismatch. In some cases, the first strand comprises no more than 3 mismatches with the target CAG repeat region. In some cases, the first strand comprises no more than 4 mismatches with the target CAG repeat region. In some cases, the second strand is 100% complementary to the first strand. In some cases, the second strand comprises from 1 to 10 mismatches (e.g., from 1 to 4, from 3 to 5, from 5 to 7, or from 5 to 10 mismatches) to the first strand. In some cases, the second strand comprises from 1 to 4 mismatches to the first strand. In some cases, the second strand comprises no more than 1, 2, 3, or 4 mismatches to the first strand. In some cases, the second strand comprises no more than 1 mismatch to the first strand. In some cases, the second strand comprises no more than 2 mismatches to the first strand. In some cases, the second strand comprises no more than 3 mismatches to the first strand. In some cases, the second strand comprises no more than 4 mismatches to the first strand. In some cases, the second strand comprises no more than 5 mismatches to the first strand. In some cases, the double-stranded RNA has a length of from 18 nucleotides to 25 nucleotides. In some cases, the double-stranded RNA has a length of 20 nucleotides. In some cases, the double-stranded RNA has a length of 21 nucleotides. In some cases, the double-stranded RNA has a length of 22 nucleotides. In some cases, the double-stranded RNA has a length of 23 nucleotides. In some cases, the double-stranded RNA has a length of 24 nucleotides. In some cases, the double-stranded RNA has a length of 25 nucleotides. In some cases, each mismatch is generated by a substitution independently selected from: a) a substitution of a G with an A, a U, or a C; b) a substitution of a U with an A, a G, or a C; and c) a substitution of a C with an A, a U, or a G. In some cases, the first strand comprises a nucleotide sequence selected from SEQ ID NO:333-335, 339, and 340. In some cases, the first strand comprises the following nucleotide sequence: CUGCUGCUGAAGAUGCUGCUG (SEQ ID NO:333; RNA guide strand sequence of “CUG_2116” in Table 6). In some cases, the first strand comprises the following nucleotide sequence: CUGCUGCUGAAGCAGCUGCUG (SEQ ID NO:334; RNA guide strand sequence of “CUG_2143” in Table 6). In some cases, the first strand comprises the following nucleotide sequence: CUGCUGCUGAAGCUACUGCUG (SEQ ID NO:335; RNA guide strand sequence of “CUG_2170” in Table 6). In some cases, the first strand comprises the following nucleotide sequence: CUGCUGCUGAAACUGCUGCUG (SEQ ID NO:339; RNA guide strand sequence of “CUG_2089” in Table 6). In some cases, the first strand comprises the following nucleotide sequence: CUGCUGCUGAAGCUGAUGCUG (SEQ ID NO:340; RNA guide strand sequence of “CUG_2197” in Table 6).

### First Mismatch at Position 10; 4 Mismatches

[0137] In some cases, a double-stranded RNA of the present disclosure comprises: a) a first strand that hybridizes to a target CAG repeat region of a CAG repeat-containing RNA; and b) a second strand that hybridizes to the first strand, where the first mismatch is at position 11 based on the numbering of SEQ ID NO:743 (CUGCUGCUGCUGCUGCUGCUG (SEQ ID NO:743)), SEQ ID NO:744 (GCUGCUGCUGCUGCUGCUGCUG (SEQ ID NO:744)), SEQ ID NO:745 (UGCUGCUGCUGCUGCUGCUGCUG (SEQ ID NO:745), (GCUGCUGCUGCUGCUGCUGCU (SEQ ID NO:866)), or SEQ ID NO:867 (UGCUGCUGCUGCUGCUGCUGC (SEQ ID NO:867), wherein the first strand comprises a second mismatch, a third mismatch, and a fourth mismatch to the target CAG repeat region, and wherein the second, third, and fourth mismatches are from 1 to 6 bases 3′ of the first mismatch. In some cases, the first strand is a variant comprising at least a first, a second, a third, and a fourth substitution of the nucleotide sequence CUGCUGCUGCUGCUGCUGCUG (SEQ ID NO:743), wherein the first substitution generates the first mismatch and is at position 10 based on the numbering of CUGCUGCUGCUGCUGCUGCUG (SEQ ID NO:743), wherein the second substitution generates the second mismatch, the third substitution generates the third mismatch, and the fourth substitution generates the fourth mismatch, and wherein the second, third, and fourth substitutions are from 1 to 6 bases 3′ of the first mismatch. In some cases, the first strand is a variant comprising at least a first, a second, a third, and a fourth substitution of the nucleotide sequence GCUGCUGCUGCUGCUGCUGCU (SEQ ID NO:866), wherein the first substitution generates the first mismatch and is at position 10 based on the numbering of GCUGCUGCUGCUGCUGCUGCU (SEQ ID NO:866), wherein the second substitution generates the second mismatch, the third substitution generates the third mismatch, and the fourth substitution generates the fourth mismatch, and wherein the second, third, and fourth substitutions are from 1 to 6 bases 3′ of the first mismatch. In some cases, the first strand is a variant comprising at least a first, a second, a third, and a fourth substitution of the nucleotide sequence UGCUGCUGCUGCUGCUGCUGC (SEQ ID NO:867), wherein the first substitution generates the first mismatch and is at position 10 based on the numbering of UGCUGCUGCUGCUGCUGCUGC (SEQ ID NO:867), wherein the second substitution generates the second mismatch, the third substitution generates the third mismatch, and the fourth substitution generates the fourth mismatch, and wherein the second, third, and fourth substitutions are from 1 to 6 bases 3′ of the first mismatch. In some cases, the first strand comprises no more than 4 mismatches with the target CAG repeat region. In some cases, the second strand is 100% complementary to the first strand. In some cases, the second strand comprises from 1 to 10 mismatches (e.g., from 1 to 4, from 3 to 5, from 5 to 7, or from 5 to 10 mismatches) to the first strand. In some cases, the second strand comprises from 1 to 4 mismatches to the first strand. In some cases, the second strand comprises no more than 1, 2, 3, or 4 mismatches to the first strand. In some cases, the second strand comprises no more than 1 mismatch to the first strand. In some cases, the second strand comprises no more than 2 mismatches to the first strand. In some cases, the second strand comprises no more than 3 mismatches to the first strand. In some cases, the second strand comprises no more than 4 mismatches to the first strand. In some cases, the second strand comprises no more than 5 mismatches to the first strand. In some cases, the double-stranded RNA has a length of from 18 nucleotides to 25 nucleotides. In some cases, the double-stranded RNA has a length of 20 nucleotides. In some cases, the double-stranded RNA has a length of 21 nucleotides. In some cases, the double-stranded RNA has a length of 22 nucleotides. In some cases, the double-stranded RNA has a length of 23 nucleotides. In some cases, the double-stranded RNA has a length of 24 nucleotides. In some cases, the double-stranded RNA has a length of 25 nucleotides. In some cases, each mismatch is generated by a substitution independently selected from: a) a substitution of a G with an A, a U, or a C; b) a substitution of a U with an A, a G, or a C; and c) a substitution of a C with an A, a U, or a G. In some cases, the first strand comprises a nucleotide sequence selected from SEQ ID NOs:345, 346, and 368-375.

### First Mismatch at Position 11; 2 Mismatches

[0138] In some cases, a double-stranded RNA of the present disclosure comprises: a) a first strand that hybridizes to a target CAG repeat region of a CAG repeat-containing RNA; and b) a second strand that hybridizes to the first strand, where the first strand comprises: i) a first mismatch to the target CAG repeat region, wherein the first mismatch is at position 11 based on the numbering of SEQ ID NO:743 (CUGCUGCUGCUGCUGCUGCUG (SEQ ID NO:743)), SEQ ID NO:744 (GCUGCUGCUGCUGCUGCUGCUG (SEQ ID NO:744)), (UGCUGCUGCUGCUGCUGCUGCUG (SEQ ID NO:745), (GCUGCUGCUGCUGCUGCUGCU (SEQ ID NO:866), or (UGCUGCUGCUGCUGCUGCUGC (SEQ ID NO:867); and ii) a second mismatch to the target CAG repeat region, wherein the second mismatch is from 1 to 5 bases 3′ of the first mismatch. In some cases, the first strand is a variant comprising at least a first and a second substitution of the nucleotide sequence CUGCUGCUGCUGCUGCUGCUG (SEQ ID NO:743), wherein the first substitution generates the first mismatch and is at position 11 based on the numbering of CUGCUGCUGCUGCUGCUGCUG (SEQ ID NO:743), and the second substitution generates the second mismatch and is from 1 to 5 bases 3′ of the first mismatch. In some cases, the first strand is a variant comprising at least a first and a second substitution of the nucleotide sequence GCUGCUGCUGCUGCUGCUGCU (SEQ ID NO:866), wherein the first substitution generates the first mismatch and is at position 11 based on the numbering of GCUGCUGCUGCUGCUGCUGCU (SEQ ID NO:866), and the second substitution generates the second mismatch and is from 1 to 5 bases 3′ of the first mismatch. the first strand is a variant comprising at least a first and a second substitution of the nucleotide sequence UGCUGCUGCUGCUGCUGCUGC (SEQ ID NO:743), wherein the first substitution generates the first mismatch and is at position 11 based on the numbering of UGCUGCUGCUGCUGCUGCUGC (SEQ ID NO:743), and the second substitution generates the second mismatch and is from 1 to 5 bases 3′ of the first mismatch. In some cases, the first strand comprises no more than 2 mismatches with the target CAG repeat region. In some cases, the first strand comprises no more than 3 mismatches with the target CAG repeat region. In some cases, the first strand comprises no more than 4 mismatches with the target CAG repeat region. In some cases, the second strand is 100% complementary to the first strand. In some cases, the second strand comprises from 1 to 10 mismatches (e.g., from 1 to 4, from 3 to 5, from 5 to 7, or from 5 to 10 mismatches) to the first strand. In some cases, the second strand comprises from 1 to 4 mismatches to the first strand. In some cases, the second strand comprises no more than 1, 2, 3, or 4 mismatches to the first strand. In some cases, the second strand comprises no more than 1 mismatch to the first strand. In some cases, the second strand comprises no more than 2 mismatches to the first strand. In some cases, the second strand comprises no more than 3 mismatches to the first strand. In some cases, the second strand comprises no more than 4 mismatches to the first strand. In some cases, the second strand comprises no more than 5 mismatches to the first strand. In some cases, the double-stranded RNA has a length of from 18 nucleotides to 25 nucleotides. In some cases, the double-stranded RNA has a length of 20 nucleotides. In some cases, the double-stranded RNA has a length of 21 nucleotides. In some cases, the double-stranded RNA has a length of 22 nucleotides. In some cases, the double-stranded RNA has a length of 23 nucleotides. In some cases, the double-stranded RNA has a length of 24 nucleotides. In some cases, the double-stranded RNA has a length of 25 nucleotides. In some cases, each mismatch is generated by a substitution independently selected from: a) a substitution of a G with an A, a U, or a C; b) a substitution of a U with an A, a G, or a C; and c) a substitution of a C with an A, a U, or a G. In some cases, the first strand comprises a nucleotide sequence selected from SEQ ID NOs:311-315. In some cases, the first strand comprises a nucleotide sequence selected from SEQ ID NOs:793-803 (as depicted in Table 8; FIG. 24). In some cases, the first strand comprises the following nucleotide sequence: CUGCUGCUGCAACUGCUGCUG (SEQ ID NO:311); RNA guide strand sequence of “CUG_217” in Table 6). In some cases, the first strand comprises the following nucleotide sequence: CUGCUGCUGCAGAUGCUGCUG (SEQ ID NO:312; RNA guide strand sequence of “CUG_226” in Table 6). In some cases, the first strand comprises the following nucleotide sequence: CUGCUGCUGCAGCAGCUGCUG (SEQ ID NO:313; RNA guide strand sequence of “CUG_235” in Table 6). In some cases, the first strand comprises the following nucleotide sequence: CUGCUGCUGCAGCUACUGCUG (SEQ ID NO:314; RNA guide strand sequence of “CUG_244” in Table 6). In some cases, the first strand comprises the following nucleotide sequence: CUGCUGCUGCAGCUGAUGCUG (SEQ ID NO:315; RNA guide strand sequence of “CUG_253” in Table 6).

### First Mismatch at Position 11; 3 Mismatches

[0139] In some cases, a double-stranded RNA of the present disclosure comprises: a) a first strand that hybridizes to a target CAG repeat region of a CAG repeat-containing RNA; and b) a second strand that hybridizes to the first strand, where the first mismatch is at position 11 based on the numbering of SEQ ID NO:743 (CUGCUGCUGCUGCUGCUGCUG (SEQ ID NO:743)), SEQ ID NO:744 (GCUGCUGCUGCUGCUGCUGCUG (SEQ ID NO:744)), or (UGCUGCUGCUGCUGCUGCUGCUG (SEQ ID NO:745)), where the first strand comprises a second mismatch and a third mismatch to the target CAG repeat region, and where the second and third mismatches are from 1 to 5 bases 3′ of the first mismatch. In some cases, the first strand is a variant comprising at least a first, a second, and a third substitution of the nucleotide sequence CUGCUGCUGCUGCUGCUGCUG (SEQ ID NO:743), wherein the first substitution generates the first mismatch and is at position 11 based on the numbering of CUGCUGCUGCUGCUGCUGCUG (SEQ ID NO:743), wherein the second substitution generates the second mismatch and the third substitution generates the third mismatch, and wherein the second substitution and the third substitution are from 1 to 5 bases 3′ of the first mismatch. In some cases, the first strand is a variant comprising at least a first, a second, and a third substitution of the nucleotide sequence GCUGCUGCUGCUGCUGCUGCU (SEQ ID NO:866), wherein the first substitution generates the first mismatch and is at position 11 based on the numbering of GCUGCUGCUGCUGCUGCUGCU (SEQ ID NO:866), wherein the second substitution generates the second mismatch and the third substitution generates the third mismatch, and wherein the second substitution and the third substitution are from 1 to 5 bases 3′ of the first mismatch. In some cases, the first strand is a variant comprising at least a first, a second, and a third substitution of the nucleotide sequence UGCUGCUGCUGCUGCUGCUGC (SEQ ID NO:867), wherein the first substitution generates the first mismatch and is at position 11 based on the numbering of UGCUGCUGCUGCUGCUGCUGC (SEQ ID NO:867), wherein the second substitution generates the second mismatch and the third substitution generates the third mismatch, and wherein the second substitution and the third substitution are from 1 to 5 bases 3′ of the first mismatch. In some cases, the first strand comprises no more than 3 mismatches with the target CAG repeat region. In some cases, the first strand comprises no more than 4 mismatches with the target CAG repeat region. In some cases, the second strand is 100% complementary to the first strand. In some cases, the second strand comprises from 1 to 10 mismatches (e.g., from 1 to 4, from 3 to 5, from 5 to 7, or from 5 to 10 mismatches) to the first strand. In some cases, the second strand comprises from 1 to 4 mismatches to the first strand. In some cases, the second strand comprises no more than 1, 2, 3, or 4 mismatches to the first strand. In some cases, the second strand comprises no more than 1 mismatch to the first strand. In some cases, the second strand comprises no more than 2 mismatches to the first strand. In some cases, the second strand comprises no more than 3 mismatches to the first strand. In some cases, the second strand comprises no more than 4 mismatches to the first strand. In some cases, the second strand comprises no more than 5 mismatches to the first strand. In some cases, the double-stranded RNA has a length of from 18 nucleotides to 25 nucleotides. In some cases, the double-stranded RNA has a length of 20 nucleotides. In some cases, the double-stranded RNA has a length of 21 nucleotides. In some cases, the double-stranded RNA has a length of 22 nucleotides. In some cases, the double-stranded RNA has a length of 23 nucleotides. In some cases, the double-stranded RNA has a length of 24 nucleotides. In some cases, the double-stranded RNA has a length of 25 nucleotides. In some cases, each mismatch is generated by a substitution independently selected from: a) a substitution of a G with an A, a U, or a C; b) a substitution of a U with an A, a G, or a C; and c) a substitution of a C with an A, a U, or a G.

### First Mismatch at Position 11; 4 Mismatches

[0140] In some cases, a double-stranded RNA of the present disclosure comprises: a) a first strand that hybridizes to a target CAG repeat region of a CAG repeat-containing RNA; and b) a second strand that hybridizes to the first strand, where the first mismatch is at position 11 based on the numbering of SEQ ID NO:743 (CUGCUGCUGCUGCUGCUGCUG (SEQ ID NO:743)), SEQ ID NO:744 (GCUGCUGCUGCUGCUGCUGCUG (SEQ ID NO:744)), or (UGCUGCUGCUGCUGCUGCUGCUG (SEQ ID NO:745)), where the first strand comprises a second mismatch, a third mismatch, and a fourth mismatch to the target CAG repeat region, and where the second, third, and fourth mismatches are from 1 to 5 bases 3′ of the first mismatch. In some cases, the first strand is a variant comprising at least a first, a second, a third, and a fourth substitution of the nucleotide sequence CUGCUGCUGCUGCUGCUGCUG (SEQ ID NO:743), wherein the first substitution generates the first mismatch and is at position 11 based on the numbering of CUGCUGCUGCUGCUGCUGCUG (SEQ ID NO:743), wherein the second substitution generates the second mismatch, the third substitution generates the third mismatch, and the fourth substitution generates the fourth mismatch, and wherein the second, third, and fourth substitutions are from 1 to 5 bases 3′ of the first mismatch. In some cases, the first strand is a variant comprising at least a first, a second, a third, and a fourth substitution of the nucleotide sequence GCUGCUGCUGCUGCUGCUGCU (SEQ ID NO:866), wherein the first substitution generates the first mismatch and is at position 11 based on the numbering of GCUGCUGCUGCUGCUGCUGCU (SEQ ID NO:866), wherein the second substitution generates the second mismatch, the third substitution generates the third mismatch, and the fourth substitution generates the fourth mismatch, and wherein the second, third, and fourth substitutions are from 1 to 5 bases 3′ of the first mismatch. In some cases, the first strand is a variant comprising at least a first, a second, a third, and a fourth substitution of the nucleotide sequence UGCUGCUGCUGCUGCUGCUGC (SEQ ID NO:867), wherein the first substitution generates the first mismatch and is at position 11 based on the numbering of UGCUGCUGCUGCUGCUGCUGC (SEQ ID NO:867), wherein the second substitution generates the second mismatch, the third substitution generates the third mismatch, and the fourth substitution generates the fourth mismatch, and wherein the second, third, and fourth substitutions are from 1 to 5 bases 3′ of the first mismatch. In some cases, the first strand comprises no more than 4 mismatches with the target CAG repeat region. In some cases, the second strand is 100% complementary to the first strand. In some cases, the second strand comprises from 1 to 10 mismatches (e.g., from 1 to 4, from 3 to 5, from 5 to 7, or from 5 to 10 mismatches) to the first strand. In some cases, the second strand comprises from 1 to 4 mismatches to the first strand. In some cases, the second strand comprises no more than 1, 2, 3, or 4 mismatches to the first strand. In some cases, the second strand comprises no more than 1 mismatch to the first strand. In some cases, the second strand comprises no more than 2 mismatches to the first strand. In some cases, the second strand comprises no more than 3 mismatches to the first strand. In some cases, the second strand comprises no more than 4 mismatches to the first strand. In some cases, the second strand comprises no more than 5 mismatches to the first strand. In some cases, the double-stranded RNA has a length of from 18 nucleotides to 25 nucleotides. In some cases, the double-stranded RNA has a length of 20 nucleotides. In some cases, the double-stranded RNA has a length of 21 nucleotides. In some cases, the double-stranded RNA has a length of 22 nucleotides. In some cases, the double-stranded RNA has a length of 23 nucleotides. In some cases, the double-stranded RNA has a length of 24 nucleotides. In some cases, the double-stranded RNA has a length of 25 nucleotides. In some cases, each mismatch is generated by a substitution independently selected from: a) a substitution of a G with an A, a U, or a C; b) a substitution of a U with an A, a G, or a C; and c) a substitution of a C with an A, a U, or a G.

### B. Target Nucleic Acids

[0141] The double stranded RNAs of the present disclosure may be targeted to any gene or nucleic acid construct containing the targeted repeat region. In some embodiments, genes (DNA or mRNA) that encode human or primate proteins are targeted. In some embodiments, non-coding genes are targeted. In some embodiments, coding regions of a gene are targeted. In some embodiments, non-coding regions of a gene are targeted.

[0142] In some embodiments, double stranded RNAs of the present disclosure target CAG-repeat containing (polyglutamine) genes. In some embodiments, the CAG repeat containing gene is selected from HTT, Ataxin 1, Ataxin 2, Ataxin 3, CACNA1A, Ataxin 7, PPP2R2B, TBP, Androgen receptor, Atrophin, MLLT3, BMP2K, THAP11, ZFHX3, POU3F2, MAML2, SMARCA2, MAML3, ORC4, RUNX2, MED12, EP400, MAGI1, UMAD1, DM1-AS, AC007161.3, IRF2BPL, and MAB21L1. Expansion of the CAG-repeat is associated with a number of dominant, genetic disorders referred to as polyglutamine (polyQ) diseases. While CAG-repeat containing proteins are ubiquitously expressed throughout the body, the pathology of polyglutamine diseases primarily appears in, but is not limited to, neuronal tissue. Thus, as used herein, the term polyglutamine disease refers to any disease or disorder associated with CAG-repeat expansion, including, but not limited to neurodegenerative diseases.

[0143] Huntingtin (HIT), also known as interesting transcript 15 (IT15), refers to a gene encoding huntingtin protein. The exact function of huntingtin is unknown but is involved in axonal transport. An example of a huntingtin transcript sequence is provided by NCBI Reference Sequence NM_002111.8 (SEQ ID NO:820). Typically, the polyglutamine tract of huntingtin has 10-35 CAG repeats. Expansion of the polyglutamine tract to 36 to more than 120 CAG repeats causes Huntington's disease. Early signs and symptoms can include irritability, depression, small involuntary movements, poor coordination, and trouble learning new information or making decisions. Many people with Huntington disease develop involuntary jerking or twitching movements known as chorea. As the disease progresses, these movements become more pronounced. Affected individuals may have trouble walking, speaking, and swallowing. People with this disorder also experience changes in personality and a decline in thinking and reasoning abilities.

[0144] Ataxin 1 (ATXN1), also known as spinocerebellar ataxia type 1 (SCA1), refers to a gene encoding a polyglutamine containing protein expressed primarily in the nucleus where it binds chromatin and functions as a transcriptional repressor. An example of a ATXN1 transcript sequence is provided by NCBI Reference Sequence NM_001128164.2 (SEQ ID NO:821). Mutant forms of ataxin-1 containing expansion of the polyglutamine tract to typically about 40-83 repeats cause the movement disorder spinocerebellar ataxia type 1 (SCA1) through a toxic gain-of-function mechanism in the cerebellum. The cerebellar dysfunction is progressive and permanent. People with this condition initially experience problems with coordination and balance (ataxia). Other signs and symptoms of SCA1 include speech and swallowing difficulties, muscle stiffness (spasticity), and weakness in the muscles that control eye movement (ophthalmoplegia). Eye muscle weakness leads to rapid, involuntary eye movements (nystagmus). Individuals with SCA1 may have difficulty processing, learning, and remembering information (cognitive impairment). Over time, individuals with SCA1 may develop numbness, tingling, or pain in the arms and legs (sensory neuropathy); uncontrolled muscle tensing (dystonia); muscle wasting (atrophy); and muscle twitches (fasciculations). Rarely, rigidity, tremors, and involuntary jerking movements (chorea) have been reported in people who have been affected for many years.

[0145] Ataxin 2 (ATXN2), also known as spinocerebellar ataxia type 2 (SCA2), refers to a gene encoding a polyglutamine containing, RNA-binding protein that targets cis-regulatory elements in 3′ UTRs to stabilize a subset of mRNAs and increase protein expression. An example of an ATXN2 transcript sequence is provided by NCBI Reference Sequence: NM_001372574.1 (SEQ ID NO:822). Polyglutamine repeat expansion in ATXN2 (e.g., typically ˜33 or more repeats) can cause signs and symptoms of spinocerebellar ataxia type 2 (SCA2). People with SCA2 initially experience problems with coordination and balance (ataxia). Other early signs and symptoms of SCA2 include additional movement problems, speech and swallowing difficulties, and weakness in the muscles that control eye movement (ophthalmoplegia). Eye muscle weakness leads to involuntary back-and-forth eye movements (nystagmus) and a decreased ability to make rapid eye movements (saccadic slowing). Over time, individuals with SCA2 may develop loss of sensation and weakness in the limbs (peripheral neuropathy), muscle wasting (atrophy), uncontrolled muscle tensing (dystonia), and involuntary jerking movements (chorea). Some people with SCA2 develop a group of movement abnormalities known as parkinsonism, which includes unusually slow movement (bradykinesia), involuntary trembling (tremor), and muscle stiffness (rigidity). Individuals with SCA2 may have problems with short term memory, planning, and problem solving, or experience an overall decline in intellectual function (dementia). Intermediate polyglutamine expansion (27-33 CAG repeats) in ATXN2 also increases the risk of amyotrophic lateral sclerosis (ALS). ALS is a neurodegenerative neuromuscular disease that results in the progressive loss of motor neurons that control voluntary muscles. Early symptoms of ALS include stiff muscles, muscle twitches, and gradual increasing weakness and muscle wasting. Limb-onset ALS begins with weakness in the arms or legs, while bulbar-onset ALS begins with difficulty speaking or swallowing. Half of the people with ALS develop at least mild difficulties with thinking and behavior, and about 15% develop frontotemporal dementia. Most people experience pain. Motor neuron loss continues until the ability to eat, speak, move, and finally the ability to breathe is lost. ALS eventually causes paralysis and early death, usually from respiratory failure.

[0146] Ataxin 3 (ATXN3), also known as spinocerebellar ataxia type 3 (SCA3), refers to a gene encoding a polyglutamine containing, deubiquitinating enzyme. An example of an ATXN3 transcript sequence is provided by NCBI Reference Sequence NM_004993.6 (SEQ ID NO:823). Expansion of the polyglutamine repeat from the normal 13-36 to more than 50 causes Machado-Joseph disease (MJD), also known as Machado-Joseph Azorean disease, Machado's disease, Joseph's disease or spinocerebellar ataxia type 3 (SCA3). People with this condition initially experience problems with coordination and balance (ataxia). Other early signs and symptoms of SCA3 include speech difficulties, uncontrolled muscle tensing (dystonia), muscle stiffness (spasticity), rigidity, tremors, bulging eyes, and double vision. People with this condition may experience sleep disorders such as restless leg syndrome or REM sleep behavior disorder. Over time, individuals with SCA3 may develop loss of sensation and weakness in the limbs (peripheral neuropathy), muscle cramps, muscle twitches (fasciculations), and swallowing difficulties. Individuals with SCA3 may have problems with memory, planning, and problem solving.

[0147] Calcium voltage-gated channel subunit alpha1 A (CACNA1A), also known as spinocerebellar ataxia type 6 (SCA6), encodes the α1A pore-forming subunit of the neuronal calcium channel P/Q. An example of a CACNA1A transcript sequence is provided by NCBI reference sequence NM_000068.4 (SEQ ID NO:824). Expansion of the polyglutamine tract in the CACNA1A gene to typically 19-33 repeats causes spinocerebellar ataxia type 6 (SCA6). People with this condition initially experience problems with coordination and balance (ataxia). Other early signs and symptoms of SCA6 include speech difficulties, involuntary eye movements (nystagmus), and double vision. Over time, individuals with SCA6 may develop loss of coordination in their arms, tremors, and uncontrolled muscle tensing (dystonia).

[0148] Ataxin 7 (ATXN7), also known as spinocerebellar ataxia type 7 (SCA7), encodes a polyglutamine containing protein that is an integral subunit of GCN5 (general control of amino acid synthesis-5; KAT2A)-containing SAGA family of histone acetyltransferase (HAT) complexes. An example of an ATXN7 transcript sequence is provided by NCBI Reference Sequence NM_001377405.1 (SEQ ID NO:825). Polyglutamine expansion in ATXN7 causes spinocerebellar ataxia type 7 (SCA7), which is characterized by progressive cerebellar ataxia, retinal degeneration or blindness due to cone-rod dystrophy, and mild changes in sensation or reflexes. Later symptoms include loss of motor control, unclear speech (dysarthria), and difficulty swallowing (dysphagia).

[0149] Protein Phosphatase 2 Regulatory Subunit Bbeta (PPP2R2B), also known as spinocerebellar ataxia type 12 (SCA12), encodes the B regulatory subunit of Protein Phosphatase 2, a serine/threonine phosphatase. An example of a PPP2R2B transcript sequence is provided by NCBI Reference Sequence NM_181674.3 (SEQ ID NO:826). Expansion of the polyglutamine repeat from the typically normal range of about 7-28 to about 55-78 causes spinocerebellar ataxia type 12 (SCA12). The age of onset of symptoms of SCA12 ranges from 8 to 55 years, though most commonly occurs in the fourth decade. Symptoms typically begin with tremors and progress to cerebellar ataxia. Signs of dementia have also been reported as associated with SCA12.

[0150] TATA-Box Binding Protein (TBP), also known as spinocerebellar ataxia type 17 (SCAJ7), encodes the TATA-binding protein, a component of transcription factor IID (TFIID). An example of a TBP transcript sequence is provided by NCBI Reference Sequence NM_003194.5 (SEQ ID NO:827). TBP typically has 25-42 polyglutamine repeats, expansion to 45-66 repeats is associated with spinocerebellar ataxia type 17 (SCA17). People with this condition typically experience symptoms such as ataxia, dementia, and involuntary movements such as chorea and dystonia, rigidity, and pyramidal signs such as spasticity, weakness, slowing of rapid alternating movements, and hyperreflexia.

[0151] Androgen Receptor (AR) encodes a steroid-hormone activated transcription factor. An example of an AR transcript sequence is provided by NCBI Reference Sequence NM_000044.6 (SEQ ID NO:828). Expansion of the polyglutamine repeats from the typically 9-34 repeats to 38-62 repeats causes spinal bulbar muscular atrophy (SBMA), also known as Kennedy's disease. SBMA is characterized by muscle weakness and atrophy that worsens over time, resulting in cramping and difficulty with walking, swallowing, and speech. SBMA may also result in gynecomastia and infertility.

[0152] Atrophin 1 (ATN1) encodes a protein that is hypothesized to be a transcriptional co-repressor that recruits Nuclear Receptor Subfamily 2 Group E Member 1 (NR2E1) to repress transcription. An example of an ATN1 transcript sequence is provided by NCBI Reference Sequence NM_001007026.2 (SEQ ID NO:829). Dentatorubral pallidoluysian atrophy (DRPLA) is a rare neurodegenerative disorder related to the expansion of the polyglutamine repeat in ATN1 from the typical 7-35 copies to 49-93 copies. When DRPLA manifests before about age 20 it is typically associated with myoclonus, ataxia, seizures, behavioral changes, and intellectual disability. When it manifests after about age 20 it is associated with ataxia, choreoathetosis, delusions, and dementia.

[0153] Myeloid/Lymphoid Or Mixed-Lineage Leukemia Translocated To Chromosome 3 (MLLT3), also known as AF-9, encodes a component of the super elongation complex (SEC), which is necessary to increase the catalytic rate of RNA polymerase II transcription. An example of a MLLT3 transcript sequence is provided by NCBI Reference Sequence NM_004529.4 (SEQ ID NO:830). MLLT3 includes an unstable polyglutamine repeat and genetic aberrations involving MLLT3 have been associated with leukemias and neuromotor development delay, cerebellar ataxia, and epilepsy.

[0154] Bone Morphogenic Protein 2 Inducible Kinase (BMP2K) encodes a protein related to skeletal development and patterning. An example of a BMP2K transcript sequence is provided by NCBI Reference Sequence NM_198892.2 (SEQ ID NO:831). BMP2K includes a polyglutamine repeat and is associated with myopia and cancer, specifically gene mis-regulation associated with cancer.

[0155] THAP Domain Containing 11 (THAP11) encodes a transcriptional repressor associated with embryogenesis. An example of a THAP11 transcript sequence is provided by NCBI Reference Sequence NM_020457.3 (SEQ ID NO:832). THAPI1 includes a polyglutamine repeat of typically about 29 copies, but ranges from 20 to over 40 copies. An increased number of polyglutamine repeats, for example 38 copies, is associated with neurodegenerative disease. Expansion of the polyglutamine in THAPI1 is also associated with intracellular aggregation of THAPI1, cellular toxicity, growth inhibition, GO/GI arrest, and inhibition of transcription activity.

[0156] Zinc Finger Homeobox 3 (ZFHX3) encodes a transcription factor that regulates myogenic and neuronal differentiation. It also functions as a tumor suppressor in several cancers and is associated with atrial fibrillation. An example of a ZFHX3 transcript sequence is provided by NCBI Reference Sequence NM_006885.4 (SEQ ID NO:833). ZFHX3 includes a polyglutamine repeat. Individuals with an expanded polyglutamine repeat, e.g. having 19 copies, is associated with coronary heart disease, hypertension, diabetes mellitus, or dyslipidemia as compared to those with fewer repeats, e.g. 17 copies.

[0157] POU Class 3 Homeobox 2 (POU3F2) encodes a transcription factor that is related to neuronal differentiation. An example of a POU3F2 transcript sequence is provided by NCBI Reference Sequence NM_005604.4 (SEQ ID NO:834). POU3F2 includes a polyglutamine tract and is associated with bipolar disorder, obesity, developmental delay, and intellectual disability.

[0158] Mastermind Like Transcriptional Coactivator 2 (MAML2) encodes a transcriptional coactivator for NOTCH proteins and promotes β-catenin turnover. An example of a MAML2 transcript sequence is provided by NCBI Reference Sequence NM_032427.4 (SEQ ID NO:835). MAML2 includes a polyglutamine tract with observed variability and is associated with cancers such as mucoepidermoid carcinomas, hidradenoma, B cell-derived lymphomas, and chronic lymphocytic leukemia.

[0159] Mastermind Like Transcriptional Coactivator 3 (MAML3) encodes a transcriptional coactivator for NOTCH proteins. An example of a MAML3 transcript sequence is provided by NCBI Reference Sequence NM_018717.5 (SEQ ID NO:836). MAML3 includes a polyglutamine tract and is associated with cancers such as schneiderian carcinoma and ossifying fibromyxoid tumor.

[0160] SWI/SNF Related, Matrix Associated, Actin Dependent Regulator Of Chromatin, Subfamily A, Member 2 (SMARCA2) encodes a component of the SWI/SNF complex that is involved in transcriptional regulation by chromatin remodeling. SMARCA2 is also involved in neural development. An example of a SMARCA2 transcript sequence is provided by NCBI Reference Sequence NM_003070.5 (SEQ ID NO:837). SMARCA2 includes a polymorphic polyglutamine tract and is associated conditions such as Nicolaides-Baraitser syndrome and blepharophimosis-impaired intellectual development syndrome. The SMARCA2 gene is also located on a chromosomal region that is linked to schizophrenia and bipolar disorder.

[0161] Origin Recognition Complex Subunit 4 (ORC4) encodes a component of the six subunit origin recognition complex (ORC) that is necessary for the initiation of DNA replication. An example of an ORC4 transcript sequence is provided by NCBI Reference Sequence NM_001190879.3 (SEQ ID NO:838). ORC4 includes a region of polymorphic trinucleotide CAG repeats located upstream of the coding sequence and is associated with Meier-Gorlin syndrome 1 and Meier-Gorlin syndrome 2

[0162] RUNX Family Transcription Factor 2 (RUNX2) encodes a nuclear protein involved osteoblastic differentiation and skeletal morphogenesis. An example of a RUNX2 transcript sequence is provided by NCBI Reference Sequence NM_001024630.4 (SEQ ID NO:839). RUNX2 includes a polyglutamine tract and a polyalanine tract. Expansion of the polyglutamine tract from, e.g., typical 23 residues to, e.g., 27-30 residues causes cleidocranial dysplasia, decreased bone mineral density, and decreases RUNX2 transactivation capacity. Cleidocranial dysplasia (CCD) is a disorder affecting the skull, bones and teeth. Signs and symptoms include absent or underdeveloped collar bones, delayed closing of fontanels in the skull, dental abnormalities, short stature, decreased bone density, hearing loss, and other bone abnormalities.

[0163] Mediator Complex Subunit 12 (MED12) encodes a component of the preinitiation complex that is involved in the control of initiation of transcription. An example of a MED12 transcript sequence is provided by NCBI Reference Sequence NM_005120.3 (SEQ ID NO:840). MED12 has a polyglutamine tract and is associated with Opitz-Kaveggia syndrome, Lujan-Fryns syndrome, Ohdo syndrome, X-linked, and tumor formation, e.g., in uterine leiomyomas.

[0164] E1A Binding Protein P400 (EP400) encodes a component of the NuA4 histone acetyltransferase complex that is involved in transcriptional activation. An example of an EP400 transcript sequence is provided by NCBI Reference Sequence NM_015409.5 (SEQ ID NO:841). EP400 normally contains about 32 CAG repeats. EP400 is involved in ossifying fibromyxoid tumor and epilepsy, familial temporal lobe, 1.

[0165] Membrane Associated Guanylate Kinase, WW And PDZ Domain Containing 1 (MAGI1) encodes a protein involved in the assembly of multiprotein complexes at regions of cell to cell contact. An example of a MAGI1 transcript sequence is provided by NCBI Reference Sequence NM_015520.2 (SEQ ID NO:842). MAGI1 contains a polymorphic polyglutamine tract and is associated with conditions such as cervical large cell neuroendocrine carcinoma and microscopic colitis.

[0166] UBAP1-MVB12-Associated (UMA) Domain Containing 1 (UMAD1) is a protein coding gene. An example of a UMAD1 transcript sequence is provided by NCBI Reference Sequence NM_001302348.2 (SEQ ID NO:843). UMAD1 includes a region of polymorphic trinucleotide CAG repeats upstream of the start codon and is associated with retinitis pigmentosa.

[0167] DM1 Locus Antisense RNA (DM1-AS) is an RNA gene. An example of a DM1-AS RNA sequence is provided by NCBI Reference Sequence NR_147193.1 (SEQ ID NO:844). DM1-AS includes a region of polymorphic trinucleotide CAG repeats in an intron and is associated with myotonic dystrophy 1 and branchiootorenal syndrome 2.

[0168] AC007161.3 also known as ENSG00000283549 is an RNA gene and contains CAG repeats.

[0169] Interferon Regulatory Factor 2 Binding Protein Like (IRF2BPL) encodes a transcription factor associated with the development of the central nervous system and in neuronal maintenance and with regulating female reproductive function. An example of an IRF2BPL transcript sequence is provided by NCBI Reference Sequence NM_024496.4 (SEQ ID NO:845). IRF2BPL includes a polyglutamine tract and is associated with neurological problems such as neurodevelopmental disorder with regression, abnormal movements, loss of speech, and seizures and Irf2bpl-related regressive neurodevelopmental disorder-dystonia-seizures syndrome.

[0170] Mab-21 Like 1 (MAB21L1) encodes a protein associated with eye and cerebellum development. An example of a MAB21L1 transcript sequence is provided by NCBI Reference Sequence NM_005584.5 (SEQ ID NO:846). MAB21L1 is associated with cerebellar, ocular, craniofacial, and genital Syndrome and hydrophthalmos. MAB21L1 includes polymorphic trinucleotide CAG repeats in the 5′ untranslated portion of the gene that are associated with psychiatric conditions such as bipolar disorder.

[0171] In some embodiments, a pathogenic or pathologic allele of a CAG repeat containing gene or RNA encoded by the CAG repeat containing gene contains at least about 30 consecutive CAG repeats.

### C. Expression Cassettes and Vectors

[0172] In some embodiments, double stranded RNAs of the disclosure are encoded by a nucleic acid molecule, for example a DNA sequence. Double stranded RNA sequences provided herein can be converted to DNA format by replacing each uracil base “U” with a thymine “T” base.

[0173] In some embodiments, nucleic acid molecule (e.g., DNA) encoding the double stranded RNA is contained within an expression cassette.

[0174] In some embodiments, the expression cassette further comprises one or more expression control sequences (regulatory sequences) operably linked with the transgene. “Operably linked” sequences include expression control sequences that are contiguous with the transgene or act in trans or at a distance from the transgene to control its expression. Examples of expression control sequences include transcription initiation sequences, termination sequences, promoter sequences, enhancer sequences, repressor sequences, splice site sequences, polyadenylation (polyA) signal sequences, or any combination thereof.

[0175] In some embodiments, a promoter is an endogenous promoter, synthetic promoter, hybrid promoter, constitutive promoter, inducible promoter, tissue-specific promoter (e.g., CNS-specific), or cell-specific promoter (neurons, glial cells, or astrocytes). Examples of constitutive promoters include, Rous sarcoma virus (RSV) LTR promoter (optionally with the RSV enhancer), cytomegalovirus (CMV) promoter (optionally with the CMV enhancer), SV40 promoter, and dihydrofolate reductase promoter. Examples of inducible promoters include zinc-inducible sheep metallothionine (MT) promoter, dexamethasone (Dex)-inducible mouse mammary tumor virus (MMTV) promoter, T7 polymerase promoter system, the ecdysone insect promoter, tetracycline-repressible system, tetracycline-inducible system, RU486-inducible system, and the rapamycin-inducible system. Further examples of promoters that may be used include, for example, chicken beta-actin promoter (CBA promoter), a CAG promoter, an H1 promoter, a CD68 promoter, a JeT promoter, synapsin promoter, RNA pol II promoter, or an RNA pol III promoter (e.g., U6, H1, etc.).

[0176] In some embodiments, a promoter is an RNA pol II promoter. Examples of pol II promoters include PGK, CBA, U1, CMV, EIF1α, EF1α, CAG, or synaptophysin promoters. In some embodiments, the promoter is a tissue-specific RNA pol II promoter. In some embodiments, the tissue-specific RNA pol II promoter is derived from a gene that exhibits neuron-specific expression. In some embodiments, an expression cassette comprises a pol II promoter and a poly(A) tail, e.g., with the DNA sequence encoding the double stranded RNA flanked on the 5′ end by the pol II promoter and on the 3′ end by the poly(A) tail.

[0177] In some embodiments, a promoter is a neuron specific promoter. Examples of neuron-specific promoters include those from neuron specific enolase (NSE), human synapsin 1, human synapsin 2 promoter, caMK kinase, and tubuline.

[0178] In some embodiments, a promoter is an RNA pol III promoter. Examples of pol III promoters include U6, H1, 7SK, Y, RPR, MRP, and selenocysteine tRNA. In some embodiments, an expression cassette comprises a pol III promoter and a poly(T) tail, e.g., with the DNA sequence encoding the double stranded RNA flanked on the 5′ end by the pol III promoter and on the 3′ end by the poly(T) tail.

[0179] In some embodiments, a promoter is a RNA pol I promoter. In some embodiments, an expression cassette comprises a pol I promoter and a 3′-box, e.g. with the DNA sequence encoding the double stranded RNA flanked on the 5′ end by the pol I promoter and on the 3′ end by the 3′-box.

[0180] Expression cassettes for double stranded RNAs are known in the art, see, e.g., ter Brake et al. Mol. Ther. (2008) 16:557; Maczuga et al., BMC Biotechnol. (2012) 12:42; and Bofill-De Ros and Gu (2016) 103:157.

[0181] In some embodiments, the DNA sequence encoding the double stranded RNA of the disclosure is positioned in an untranslated region of an expression cassette. In some embodiments, the sequence encoding the inhibitory nucleic acid of the present disclosure is positioned in an intron, a 5′ untranslated region (5 ′UTR), or a 3′ untranslated region (3′UTR) of the expression cassette. In some embodiments, the sequence encoding the inhibitory nucleic acid of the present disclosure is positioned in an intron downstream of the promoter and upstream of an expressed gene.

[0182] In some embodiments, the DNA sequence encoding a double stranded RNA of the disclosure is flanked by two AAV inverted terminal repeats (ITRs) (e.g., 5′ ITR and 3′ ITR) within the expression cassette. In some embodiments, each AAV ITR is a full length ITR (e.g., approximately 145 bp in length, and containing functional Rep binding site (RBS) and terminal resolution site (trs)). In some embodiments, one of the ITRs is truncated (e.g., shortened or not full-length). In some embodiments, a truncated ITR lacks a functional terminal resolution site (trs) and is used for production of self-complementary AAV vectors (scAAV vectors).

[0183] In some embodiments, double-stranded RNAs described herein can be encoded by vectors, such as plasmids, non-viral vectors, or viral vectors. The use of vectors for expressing double-stranded RNAs of the present disclosure may allow for continual or controlled expression of the double-stranded RNAs in the subject, rather than multiple doses of the double-stranded RNAs to the subject. The present disclosure provides a vector comprising an isolated nucleic acid comprising an expression cassette encoding a double-stranded RNA described herein.

[0184] Viral vectors include, but are not limited to, herpesvirus (HSV) vectors, retroviral vectors, adenoviral vectors, adeno-associated viral (AAV) vectors, lentiviral vectors, baculoviral vectors, and the like.

[0185] In some embodiments, the vector encoding a double stranded RNA of the disclosure is a retroviral vector. In some embodiments, a retroviral vector is a mouse stem cell virus, murine leukemia virus (e.g., Moloney murine leukemia virus vector), feline leukemia virus, feline sarcoma virus, or avian reticuloendotheliosis virus vector. In some embodiments, the vector encoding a double stranded RNA of the disclosure is a lentivirus or lentiviral based vector. In some embodiments, a lentiviral vector is a HIV (human immunodeficiency virus, including HIV type 1 and HIV type 2, equine infectious anemia virus, feline immunodeficiency virus (FIV), bovine immune deficiency virus (BIV), and simian immunodeficiency virus (SIV), equine infectious anemia virus, or Maedi-Visna viral vector. Methods for expressing shRNAs using lentivirus engineered cells are known in the art, for example, Stegmeier et al. Proc. Natl. Acad. Sci. USA (2005) 102:13212-13217; Klinghoffer et al. RNA (2010) 16:879-884. Production of replication-incompetent recombinant lentivirus may be achieved, for example, by co-transfection of expression vectors and packaging plasmids using commercially available packaging cell lines, such as TLA-HEK293TM, and packaging plasmids (Thermo Scientific/Open Biosystems, Huntsville, AL).

[0186] In some embodiments, the vector encoding a double stranded RNA of the disclosure is an adeno-associated virus (AAV) vector, such as a recombinant rAAV vector, which is produced by recombinant methods. AAV is a single-stranded, non-enveloped DNA virus having a genome that encodes proteins for replication (rep) and the capsid (Cap), flanked by two ITRs, which serve as the origin of replication of the viral genome. AAV also contains a packaging sequence, allowing packaging of the viral genome into an AAV capsid. In some embodiments, the AAV vector comprises an expression cassette encoding a double stranded RNA of the present disclosure flanked by two cis-acting AAV ITRs (5′ ITR and 3′ ITR). Functional ITR sequences are used for the rescue, replication and packaging of the AAV viral particle. Thus, an AAV vector is defined herein to include at least those sequences required in cis for replication and packaging (e.g., one or two functional ITRs and packaging sequence) of the virus. In some embodiments, each AAV ITR is a full length ITR (e.g., approximately 145 bp in length, and containing functional Rep binding site (RBS) and terminal resolution site (trs)). In some embodiments, one or both of the ITRs is modified, e.g., by insertion, deletion, or substitution, provided that the ITRs provide for functional rescue, replication, and packaging. In some embodiments, a modified ITR lacks a functional terminal resolution site (trs) and is used for production of self-complementary AAV vectors (scAAV vectors). In some embodiments, the ITRs are selected from any one of serotypes AAV1, AAV2, AAV3, AAV4, AAV5, AAV6, AAV7, AAV8, AAV9, AAV.Rh10, AAV11 and variants thereof. In some cases, the ITRs are from AAV2.

[0187] Other expression control sequences may be present in the rAAV vector operably linked to the DNA sequence encoding the double stranded RNA, including one or more of transcription initiation sequences, termination sequences, promoter sequences, enhancer sequences, repressor sequences, splice site sequences, polyadenylation (polyA) signal sequences, or any combination thereof.

[0188] rAAV vectors may have one or more AAV wild type genes deleted in whole or in part. In some embodiments the rAAV vector is replication defective. In some embodiments, the rAAV vector lacks a functional Rep protein and/or capsid protein.

[0189] Methods of packaging recombinant AAV vector into AAV capsids using host cell culture are known in the art. In some embodiments, one or more of the required components for packaging the rAAV vector, (e.g., Rep sequence, cap sequence, and/or accessory functions) may be provided by a stable host cell that has been engineered to contain the one or more required components (e.g., by a vector). Expression of the required components for AAV packaging may be under control of an inducible or constitutive promoter in the host packaging cell. AAV helper vectors are commonly used to provide transient expression of AAV rep and/or cap genes, which function in trans, to complement missing AAV functions that are necessary for AAV replication. In some embodiments, AAV helper vectors lack AAV ITRs and can neither replicate nor package themselves. AAV helper vectors can be in the form of a plasmid, phage, transposon, cosmid, virus, or virion.

[0190] Recombinant AAV vectors of the present disclosure may be encapsidated by an AAV capsid to form a rAAV particle. A “rAAV particle” or “rAAV virion” refers to an infectious, replication-defective virus including an AAV protein shell, encapsidating a transgene of interest which is flanked on both sides by AAV ITRs. A rAAV particle is produced in a suitable host cell which has sequences specifying a rAAV vector, AAV helper functions and accessory functions introduced therein to render the host cell capable of encoding AAV polypeptides that are required for packaging the rAAV vector (containing the transgene sequence of interest) into infectious rAAV particles for subsequent gene delivery to a target cell.

[0191] In some embodiments, rAAV particles may be produced using the triple transfection method (see, e.g., U.S. Pat. No. 6,001,650, incorporated herein by reference in its entirety). In this approach, the rAAV particles are produced by transfecting a host cell with a rAAV vector (comprising a transgene) to be packaged into rAAV particles, an AAV helper vector, and an accessory function vector. In some embodiments, the AAV helper function vector supports efficient AAV vector production without generating any detectable wild-type AAV virions (e.g., AAV virions containing functional rep and cap genes). The accessory function vector encodes nucleotide sequences for non-AAV derived viral and/or cellular functions upon which AAV is dependent for replication (e.g., “accessory functions”). The accessory functions include those functions required for AAV replication, including, without limitation, those moieties involved in activation of AAV gene transcription, stage specific AAV mRNA splicing, AAV DNA replication, synthesis of cap expression products, and AAV capsid assembly. Viral-based accessory functions can be derived from any of the known helper viruses such as adenovirus, herpesvirus (other than herpes simplex virus type-1), and vaccinia virus. In some embodiments, a double transfection method, wherein the AAV helper function and accessory function are cloned on a single vector, is used to generate rAAV particles.

[0192] The AAV capsid is an important element in determining the tissue-specificity of the rAAV particle. Thus, a rAAV particle having a particular capsid tissue specificity can be selected. In some embodiments, the rAAV particle comprises a capsid selected from an AAV serotype selected from AAV1, AAV2, AAV3, AAV4, AAV5, AAV6, AAV7, AAV8, AAV9, AAV.Rh10, AAV11, and variants thereof. In some embodiments, the AAV capsid is selected from a serotype that is capable of crossing the blood-brain barrier, e.g., AAV9, AAVrh.10, or a variant thereof. In some embodiments, the AAV capsid is a chimeric AAV capsid.

[0193] In some embodiments, the rAAV vector is a mammalian serotype AAV vector (e.g., AAV genome and ITRs derived from mammalian serotype AAV), including a primate serotype AAV vector or human serotype AAV vector. In some embodiments, the AAV vector is derived from any one of serotypes AAV1, AAV2, AAV3, AAV4, AAV5, AAV6, AAV7, AAV8, AAV9, AAV.Rh10, AAV11, and variants thereof. In some embodiments, the AAV vector is a chimeric AAV vector. In some embodiments, rAAV vectors may be vectors comprising an AAV genome and AAV capsid derived from the same AAV serotype. In some embodiments, rAAV vectors are pseudotyped, meaning the rAAV vectors comprise an AAV genome derived from one AAV serotype and an AAV capsid derived at least in part from a different AAV serotype.

[0194] In some embodiments, the rAAV vector is AAV9 serotype. In some embodiments, the rAAV comprises an AAV9 capsid protein (e.g., SEQ ID NO:2 of U.S. Pat. No. 7,198,951), an AAV9 rep protein (e.g., SEQ ID NO:3 of U.S. Pat. No. 7,198,951), or both. In some embodiments, the rAAV comprises: (i) an AAV9 capsid protein (e.g., SEQ ID NO:2 of U.S. Pat. No. 7,198,951), and (ii) AAV2 ITRs.

[0195] In some embodiments, the rAAV particle is capable of transducing cells of the central nervous system (CNS). In some embodiments, the rAAV particle is capable of transducing non-neuronal cells or neuronal cells of the CNS. In some embodiments, the CNS cell is a neuron, glial cell, astrocyte, or microglial cell.

[0196] In some embodiments, the rAAV vector is a self-complementary AAV (scAAV) vector. scAAV vectors contain two complementary DNA strands in the form of a dimeric inverted repeat genome. The two complementary strands within the dimeric inverted repeat genome anneal together to form one double stranded DNA that is ready for immediate replication and transcription, thus bypassing the requirement for host cell DNA synthesis. Self-complementary AAV vectors are described in U.S. Pat. Nos. 7,465,583; 7,790,154; 8,361,457; and 8,784,799.

[0197] The present disclosure also provides host cells transfected with the rAAV comprising a DNA sequence encoding the double stranded RNAs described herein. In some embodiments, the host cell is a prokaryotic cell or a eukaryotic cell. In some embodiments, the host cell is a mammalian cell (e.g., HEK293T, COS cells, HeLa cells, KB cells), bacterial cell (E. coli), yeast cell, insect cell (Sf9, Sf21, Drosophila, mosquito), etc. In some embodiments, the host cell is obtained or derived from a human subject. In some embodiments, the host cell is a fibroblast.

### DNA Molecule Encoding One or Both Strands of a Double-Stranded RNA

[0198] The present disclosure provides a DNA molecule comprising a nucleotide sequence encoding the first strand of a double-stranded RNA of the present disclosure. In some cases, the nucleotide sequence encoding the first strand is operably linked to a promoter. In some cases, the nucleotide sequence encoding the first strand is operably linked to a promoter that is functional in a eukaryotic cell. The present disclosure provides a DNA molecule comprising a nucleotide sequence encoding: i) the first strand of a double-stranded RNA of the present disclosure; and ii) the second strand of a double-stranded RNA of the present disclosure. In some cases, the nucleotide sequence encoding the first strand and the second strand is operably linked to a promoter. In some cases, the promoter is a PolII promoter. In some cases, the promoter is a U6 promoter. In some cases, the promoter is a CAG promoter. In some cases, the promoter is a CBA promoter. In some cases, the promoter is a CMV promoter. In some cases, the promoter is an EF1α promoter. In some cases, the promoter is an H1 promoter. In some cases, a DNA molecule of the present disclosure comprises a nucleotide sequence that encodes any one of SEQ ID NOs:295-375.

### Recombinant RNA Molecules

[0199] The present disclosure provides a recombinant nucleic acid (e.g., a recombinant RNA; which may be referred to as an “artificial microRNA” or a “small binding RNA” (sbRNA)) comprising: a) a double-stranded RNA of the present disclosure; and b) a microRNA scaffold comprising a 5′ flanking polynucleotide (also referred to herein as a “5′ leader”), a loop polynucleotide, and a 3′ flanking polynucleotide (also referred to herein as a “3′ trailer”), wherein the recombinant nucleic acid comprises: i) the 5′ flanking polynucleotide; ii) the first strand of the double-stranded RNA; iii) the loop polynucleotide; (iv) the second strand of the double-stranded RNA; and iii) the 3′ trailer polynucleotide; and wherein at least one of the 5′ flanking polynucleotide, the loop polynucleotide, and the 3′ flanking polynucleotide is heterologous to the first and/or the second strand of the double-stranded RNA. The present disclosure provides a recombinant nucleic acid (e.g., a recombinant RNA) comprising: a) a double-stranded RNA of the present disclosure; and b) a microRNA scaffold comprising a 5′ flanking polynucleotide, a loop polynucleotide, and a 3′ flanking polynucleotide, wherein the recombinant nucleic acid comprises: i) the 5′ flanking polynucleotide; ii) the second strand of the double-stranded RNA; iii) the loop polynucleotide; (iv) the first strand of the double-stranded RNA; and iii) the 3′ flanking polynucleotide; and wherein at least one of the 5′ flanking polynucleotide, the loop polynucleotide, and the 3′ flanking polynucleotide is heterologous to the first and/or the second strand of the double-stranded RNA. In some cases, the 5′ flanking polynucleotide, the loop polynucleotide, and the 3′ flanking polynucleotide are derived from miR33.

[0200] The present disclosure provides a recombinant nucleic acid (e.g., a recombinant RNA; which may be referred to as an “artificial microRNA” or a “small binding RNA” (sbRNA)) comprising: a) a double-stranded RNA of the present disclosure; and b) a microRNA scaffold comprising a 5′ flanking polynucleotide (also referred to herein as a “5′ leader”) and a 3′ flanking polynucleotide (also referred to herein as a “3′ trailer”), wherein the recombinant nucleic acid comprises: i) the 5′ flanking polynucleotide; ii) the first strand of the double-stranded RNA; iii) the second strand of the double-stranded RNA; and iv) the 3′ trailer polynucleotide; and wherein one or both of the 5′ flanking polynucleotide and the 3′ flanking polynucleotide is heterologous to the first and/or the second strand of the double-stranded RNA. The present disclosure provides a recombinant nucleic acid (e.g., a recombinant RNA) comprising: a) a double-stranded RNA of the present disclosure; and b) a microRNA scaffold comprising a 5′ flanking polynucleotide and a 3′ flanking polynucleotide, wherein the recombinant nucleic acid comprises: i) the 5′ flanking polynucleotide; ii) the second strand of the double-stranded RNA; iii) the first strand of the double-stranded RNA; and iv) the 3′ flanking polynucleotide; and wherein one or both of 5′ flanking polynucleotide and the 3′ flanking polynucleotide is heterologous to the first and/or the second strand of the double-stranded RNA. In some cases, the 5′ flanking polynucleotide and the 3′ flanking polynucleotide are derived from miR451.

### Cassettes Encoding a Recombinant RNA Molecule

[0201] The present disclosure provides a DNA molecule (e.g, a “cassette”, which can be inserted into an expression vector to generate a recombinant expression vector) comprising a nucleotide sequence encoding a recombinant RNA molecule of the present disclosure (where the recombinant RNA molecule may be referred to as an “artificial microRNA” or an “sbRNA”), where the recombinant RNA molecule comprises: a) a double-stranded RNA of the present disclosure; and b) a microRNA scaffold comprising a 5′ flanking polynucleotide (also referred to herein as a “5′ leader”), a loop polynucleotide, and a 3′ flanking polynucleotide (also referred to herein as a “3′ trailer”), wherein the recombinant nucleic acid comprises: i) the 5′ flanking polynucleotide; ii) the first strand of the double-stranded RNA; iii) the loop polynucleotide; (iv) the second strand of the double-stranded RNA; and iii) the 3′ trailer polynucleotide; and wherein at least one of the 5′ flanking polynucleotide, the loop polynucleotide, and the 3′ flanking polynucleotide is heterologous to the first and/or the second strand of the double-stranded RNA. The present disclosure provides a DNA molecule (e.g, a “cassette”, which can be inserted into an expression vector to generate a recombinant expression vector) comprising a nucleotide sequence encoding a recombinant RNA molecule of the present disclosure (where the recombinant RNA molecule may be referred to as an “artificial microRNA” or “sbRNA”), where the recombinant RNA molecule comprises: a) a double-stranded RNA of the present disclosure; and b) a microRNA scaffold comprising a 5′ flanking polynucleotide, a loop polynucleotide, and a 3′ flanking polynucleotide, wherein the recombinant nucleic acid comprises: i) the 5′ flanking polynucleotide; ii) the second strand of the double-stranded RNA; iii) the loop polynucleotide; (iv) the first strand of the double-stranded RNA; and iii) the 3′ flanking polynucleotide; and wherein at least one of the 5′ flanking polynucleotide, the loop polynucleotide, and the 3′ flanking polynucleotide is heterologous to the first and/or the second strand of the double-stranded RNA. In some cases, the 5′ flanking polynucleotide, the loop polynucleotide, and the 3′ flanking polynucleotide are derived from miR33. In some cases, the cassette includes a Pol3 transcription sequence; for example, in some cases, the cassette includes the nucleotide sequence TTTTTG 3′ of the nucleotide sequence encoding the 3′ trailer polynucleotide. In some cases, the cassette includes the nucleotide sequence Tₙ, where n is an integer from 5 to 10 (e.g., n is 5, 6, 7, 8, 9, or 10), 3′ of the nucleotide sequence encoding the 3′ trailer polynucleotide. In some cases, a cassette has a length of from about 110 nucleotides to about 150 nucleotides. In some cases, the cassette includes a Pol II transcription sequence; for example, in some cases, the cassette includes a polyadenylation sequence 3′ of the nucleotide sequence encoding the 3′ flanking polynucleotide.

[0202] The present disclosure provides a DNA molecule (e.g, a “cassette”, which can be inserted into an expression vector to generate a recombinant expression vector) comprising a nucleotide sequence encoding a recombinant RNA molecule of the present disclosure (where the recombinant RNA molecule may be referred to as an “artificial microRNA” or “sbRNA”), where the recombinant RNA molecule comprises: a) a double-stranded RNA of the present disclosure; and b) a microRNA scaffold comprising a 5′ flanking polynucleotide (also referred to herein as a “5′ leader”) and a 3′ flanking polynucleotide (also referred to herein as a “3′ trailer”), wherein the recombinant nucleic acid comprises: i) the 5′ flanking polynucleotide; ii) the first strand of the double-stranded RNA; iii) the second strand of the double-stranded RNA; and iv) the 3′ trailer polynucleotide; and wherein one or both of the 5′ flanking polynucleotide and the 3′ flanking polynucleotide is heterologous to the first and/or the second strand of the double-stranded RNA. The present disclosure provides a DNA molecule (e.g, a “cassette”, which can be inserted into an expression vector to generate a recombinant expression vector) comprising a nucleotide sequence encoding a recombinant RNA molecule of the present disclosure (where the recombinant RNA molecule may be referred to as an “artificial microRNA” or “sbRNA”), where the recombinant RNA molecule comprises: a) a double-stranded RNA of the present disclosure; and b) a microRNA scaffold comprising a 5′ flanking polynucleotide and a 3′ flanking polynucleotide, wherein the recombinant nucleic acid comprises: i) the 5′ flanking polynucleotide; ii) the second strand of the double-stranded RNA; iii) the first strand of the double-stranded RNA; and iv) the 3′ flanking polynucleotide; and wherein one or both of 5′ flanking polynucleotide and the 3′ flanking polynucleotide is heterologous to the first and/or the second strand of the double-stranded RNA. In some cases, the 5′ flanking polynucleotide and the 3′ flanking polynucleotide are derived from miR451. In some cases, the cassette includes a Pol3 transcription sequence; for example, in some cases, the cassette includes the nucleotide sequence TTTTTG 3′ of the nucleotide sequence encoding the 3′ trailer polynucleotide. In some cases, the cassette includes the nucleotide sequence Tₙ, where n is an integer from 5 to 10 (e.g., n is 5, 6, 7, 8, 9, or 10), 3′ of the nucleotide sequence encoding the 3′ trailer polynucleotide. In some cases, a cassette has a length of from about 110 nucleotides to about 650 nucleotides (e.g., from 110 nucleotides (nt) to 115 nt, from 115 nt to 120 nt, from 500 nt to 600 nt, or from 600 nt to 610 nt). In some cases, the cassette includes a Pol II transcription sequence; for example, in some cases, the cassette includes a polyadenylation sequence 3′ of the nucleotide sequence encoding the 3′ flanking polynucleotide.

[0203] In some cases, the portion of the cassette encoding the 5′ flanking polynucleotide comprises the nucleotide sequence tgcacacctcctggcgggcagctctg (SEQ ID NO:738). In some cases, the portion of the cassette encoding the loop polynucleotide comprises the nucleotide sequence tgttctggcaatacctg (SEQ ID NO:739). In some cases, the portion of the cassette encoding the 3′ flanking polynucleotide comprises the nucleotide sequence gggaggcctgccctgactgcccac (SEQ ID NO:740). In some cases, the cassette includes a Pol3 transcription sequence; for example, in some cases, the cassette includes the nucleotide sequence TTTTTG 3′ of the nucleotide sequence encoding the 3′ trailer polynucleotide. In some cases, a cassette has a length of from about 110 nucleotides to about 150 nucleotides. In some cases, the cassette includes a Pol II transcription sequence; for example, in some cases, the cassette includes a polyadenylation sequence 3′ of the nucleotide sequence encoding the 3′ flanking polynucleotide.

[0204] In some cases, the portion of the cassette encoding the 5′ flanking polynucleotide comprises the nucleotide sequence acctactgactgccagggcacttgggaatggcaagg (SEQ ID NO:854). In some cases, the portion of the cassette encoding the 3′ flanking polynucleotide comprises the nucleotide sequence tcttgctatacccagaaaacgtgccaggaagagaac (SEQ ID NO:855). In some cases, the portion of the cassette encoding the 5′ flanking polynucleotide comprises the nucleotide sequence acctactgactgccagggcacttgggaatggcaagg (SEQ ID NO:854); and the portion of the cassette encoding the 3′ flanking polynucleotide comprises the nucleotide sequence tcttgctatacccagaaaacgtgccaggaagagaac (SEQ ID NO:855).

[0205] In some cases, the portion of the cassette encoding the 5′ flanking polynucleotide comprises the nucleotide sequence gctcctgggcaacgtgctggttattgtgctgtctcatcattttggcaaagaattaagggcgaattcgagctcggtacctcgcgaatgcatctag atatcggcgctatgcttcctgtgcccccagtggggccctggctgggatTtcatcatatactgtaagtttgcgatgagacactacagtatagatg atgtactagtccgggcacccccagctctggagcctgacaaggaggacaggagagatgctgcaagcccaagaagctctctgctcagcctgtc acaacctactgactgccagggcacttgggaatggcaagg (SEQ ID NO:856). In some cases, the portion of the cassette encoding the 3′ flanking polynucleotide comprises the nucleotide sequence tcttgctatacccagaaaacgtgccaggaagagaactcaggaccctgaagcagactactggaagggagactccagctcaaacaaggcagg ggtgggggcgtgggattgggggtaggggagggaatagatacattttctctttcctgttgtaaagaaataaagataagccaggcacagtggct cacgcctgtaatcccaccactttcagaggccaaggcgctggatccagatctcgagcggccgcccg (SEQ ID NO:857). In some cases, the portion of the cassette encoding the 5′ flanking polynucleotide comprises the nucleotide sequence gctcctgggcaacgtgctggttattgtgctgtctcatcattttggcaaagaattaagggcgaattcgagctcggtacctcgcgaatgcatctag atatcggcgctatgcttcctgtgcccccagtggggccctggctgggatTtcatcatatactgtaagtttgcgatgagacactacagtatagatg atgtactagtccgggcacccccagctctggagcctgacaaggaggacaggagagatgctgcaagcccaagaagctctctgctcagcctgtc acaacctactgactgccagggcacttgggaatggcaagg (SEQ ID NO:856); and the portion of the cassette encoding the 3′ flanking polynucleotide comprises the nucleotide sequence tcttgctatacccagaaaacgtgccaggaagagaactcaggaccctgaagcagactactggaagggagactccagctcaaacaaggcagg ggtgggggcgtgggattgggggtaggggagggaatagatacattttctctttcctgttgtaaagaaataaagataagccaggcacagtggct cacgcctgtaatcccaccactttcagaggccaaggcgctggatccagatctcgagcggccgcccg (SEQ ID NO:857).

[0206] In some cases, the portion of the cassette encoding the 5′ flanking polynucleotide comprises the nucleotide sequence gctcctgggcaacgtgctggttattgtgctgtctcatcattttggcaaagaattaagggcgaattcgagctcggtacctcgcgaatgcatctag atatcggcgctatgcttcctgtgcccccagtggggccctggctgggatAtcatcatatactgtaagtttgcgatgagacactacagtatagatg atgtactagtccgggcacccccagctctggagcctgacaaggaggacaggagagatgctgcaagcccaagaagctctctgctcagcctgtc acaacctactgactgccagggcacttgggaatggcaagg (SEQ ID NO:858). In some cases, the portion of the cassette encoding the 3′ flanking polynucleotide comprises the nucleotide sequence tcttgctatacccagaaaacgtgccaggaagagaactcaggaccctgaagcagactactggaagggagactccagctcaaacaaggcagg ggtgggggcgtgggattgggggtaggggagggaatagatacattttctctttcctgttgtaaagaaataaagataagccaggcacagtggct cacgcctgtaatcccaccactttcagaggccaaggcgctggatccagatctcgagcggccgccc (SEQ ID NO:859). In some cases, the portion of the cassette encoding the 5′ flanking polynucleotide comprises the nucleotide sequence gctcctgggcaacgtgctggttattgtgctgtctcatcattttggcaaagaattaagggcgaattcgagctcggtacctcgcgaatgcatctag atatcggcgctatgcttcctgtgcccccagtggggccctggctgggatAtcatcatatactgtaagtttgcgatgagacactacagtatagatg atgtactagtccgggcacccccagctctggagcctgacaaggaggacaggagagatgctgcaagcccaagaagctctctgctcagcctgtc acaacctactgactgccagggcacttgggaatggcaagg (SEQ ID NO:858); and the portion of the cassette encoding the 3′ flanking polynucleotide comprises the nucleotide sequence tcttgctatacccagaaaacgtgccaggaagagaactcaggaccctgaagcagactactggaagggagactccagctcaaacaaggcagg ggtgggggcgtgggattgggggtaggggagggaatagatacattttctctttcctgttgtaaagaaataaagataagccaggcacagtggct cacgcctgtaatcccaccactttcagaggccaaggcgctggatccagatctcgagcggccgccc (SEQ ID NO:859).

[0207] The following are non-limiting examples of cassettes. In the following cassettes: (i) tgcacacctcctggcgggcagctctg (SEQ ID NO:738) encodes the 5′ leader polynucleotide; (ii) the first upper case sequence encodes the first strand of the double-stranded RNA; (iii) tgttctggcaatacctg (SEQ ID NO:739) encodes the loop polynucleotide; (iv) the second upper case sequence encodes the second strand of the double-stranded RNA; (v) gggaggcctgccctgactgcccac (SEQ ID NO:740) encodes the 3′ trailer polynucleotide; and (vi) TTTTTG is the Pol3 transcription termination sequence. In some cases, the cassette does not include the 3′ TTTTTG sequence. In some cases, the cassette includes the nucleotide sequence Tₙ, where n is an integer from 5 to 10 (e.g., n is 5, 6, 7, 8, 9, or 10), in place of the 3′ TTTTTG sequence. In some cases, the cassette includes the nucleotide sequence TTTTT in place of the 3′ TTTTTG sequence.

1) In some cases, a cassette comprises the nucleotide sequence: tgcacacctcctggcgggcagctctgCTGCTGCTAATGCTGCTGCTGtgttctggcaatacctgCAGCAGCAGCA AAAGCAGCAGCAgggaggcctgccctgactgcccacTTTTTG (SEQ ID NO:579; “CUG-10” in Table 7; FIG. 23). In some cases, the cassette does not include the 3′ TTTTTG sequence.
2) In some cases, a cassette comprises the nucleotide sequence: tgcacacctcctggcgggcagctctgCTGCTGCTACAGCTGCTGCTGtgttctggcaatacctgCAGCAGCAGCAGAAGCA GCAGCAgggaggcctgccctgactgcccacTTTTTG (SEQ ID NO:580; “CUG_19” in Table 7; FIG. 23). In some cases, the cassette does not include the 3′ TTTTTG sequence;
3) In some cases, a cassette comprises the nucleotide sequence: tgcacacctcctggcgggcagctctgCTGCTGCTACTACTGCTGCTGtgttctggcaatacctgCAGCAGCAGAAGAAGCA GCAGCAgggaggcctgccctgactgcccacTTTTTG (SEQ ID NO:581; “CUG_28” in Table 7; FIG. 23). In some cases, the cassette does not include the 3′ TTTTTG sequence;
4) In some cases, a cassette comprises the nucleotide sequence: tgcacacctcctggcgggcagctctgCTGCTGCTACTGATGCTGCTGtgttctggcaatacctgCAGCAGCAACAGAAGCA GCAGCAgggaggcctgccctgactgcccacTTTTTG (SEQ ID NO:582; “CUG_37” in Table 7; FIG. 23). In some cases, the cassette does not include the 3′ TTTTTG sequence;
5) In some cases, a cassette comprises the nucleotide sequence: tgcacacctcctggcgggcagctctgCTGCTGCTACTGCAGCTGCTGtgttctggcaatacctgCAGCAGCAGCAGAAGCA GCAGCAgggaggcctgccctgactgcccacTTTTTG (SEQ ID NO:583; “CUG_46” in Table 7; FIG. 23). In some cases, the cassette does not include the 3′ TTTTTG sequence;
6) In some cases, a cassette comprises the nucleotide sequence: tgcacacctcctggcgggcagctctgCTGCTGCTACTGCTACTGCTGtgttctggcaatacctgCAGCAGAAGCAGAAGCA GCAGCAgggaggcctgccctgactgcccacTTTTTG (SEQ ID NO:584; CUG_55” in Table 7; FIG. 23). In some cases, the cassette does not include the 3′ TTTTTG sequence;
7) In some cases, a cassette comprises the nucleotide sequence: tgcacacctcctggcgggcagctctgCTGCTGCTACTGCTGATGCTGtgttctggcaatacctgCAGCAACAGCAGAAGCA GCAGCAgggaggcctgccctgactgcccacTTTTTG (SEQ ID NO:585; “CUG_64” in Table 7; FIG. 23). In some cases, the cassette does not include the 3′ TTTTTG sequence;
8) In some cases, a cassette comprises the nucleotide sequence: tgcacacctcctggcgggcagctctgCTGCTGCTGAAGCTGCTGCTGtgttctggcaatacctgCAGCAGCAGCAACAGCA GCAGCAgggaggcctgccctgactgcccacTTTTTG (SEQ ID NO:586; “CUG_118” in Table 7; FIG. 23). In some cases, the cassette does not include the 3′ TTTTTG sequence;
9) In some cases, a cassette comprises the nucleotide sequence: tgcacacctcctggcgggcagctctgCTGCTGCTGATACTGCTGCTGtgttctggcaatacctgCAGCAGCAGAAACAGCA GCAGCAgggaggcctgccctgactgcccacTTTTTG (SEQ ID NO:587; “CUG_127” in Table 7; FIG. 23). In some cases, the cassette does not include the 3′ TTTTTG sequence;
10) In some cases, a cassette comprises the nucleotide sequence: tgcacacctcctggcgggcagctctgCTGCTGCTGATGATGCTGCTGtgttctggcaatacctgCAGCAGCAACAACAGCA GCAGCAgggaggcctgccctgactgcccacTTTTTG (SEQ ID NO:588; “CUG_136” in Table 7; FIG. 23). In some cases, the cassette does not include the 3′ TTTTTG sequence;
11) In some cases, a cassette comprises the nucleotide sequence: tgcacacctcctggcgggcagctctgCTGCTGCTGATGCAGCTGCTGtgttctggcaatacctgCAGCAGCAGCAACAGCA GCAGCAgggaggcctgccctgactgcccacTTTTTG (SEQ ID NO:589; “CUG_145” in Table 7; FIG. 23). In some cases, the cassette does not include the 3′ TTTTTG sequence;
12) In some cases, a cassette comprises the nucleotide sequence: tgcacacctcctggcgggcagctctgCTGCTGCTGATGCTACTGCTGtgttctggcaatacctgCAGCAGAAGCAACAGCA GCAGCAgggaggcctgccctgactgcccacTTTTTG (SEQ ID NO:590; “CUG_154” in Table 7; FIG. 23). In some cases, the cassette does not include the 3′ TTTTTG sequence;
13) In some cases, a cassette comprises the nucleotide sequence: tgcacacctcctggcgggcagctctgCTGCTGCTGATGCTGATGCTGtgttctggcaatacctgCAGCAACAGCAACAGCA GCAGCAgggaggcctgccctgactgcccacTTTTTG (SEQ ID NO:591; “CUG_163” in Table 7; FIG. 23). In some cases, the cassette does not include the 3′ TTTTTG sequence;
14) In some cases, a cassette comprises the nucleotide sequence: tgcacacctcctggcgggcagctctgCTGCTGCTGCAACTGCTGCTGtgttctggcaatacctgCAGCAGCAGAAGCAGCA GCAGCAgggaggcctgccctgactgcccacTTTTTG (SEQ ID NO:592; “CUG_217” in Table 7; FIG. 23). In some cases, the cassette does not include the 3′ TTTTTG sequence;
15) In some cases, a cassette comprises the nucleotide sequence: tgcacacctcctggcgggcagctctgCTGCTGCTGCAGATGCTGCTGtgttctggcaatacctgCAGCAGCAACAGCAGCA GCAGCAgggaggcctgccctgactgcccacTTTTTG (SEQ ID NO:593; “CUG_226” in Table 7; FIG. 23). In some cases, the cassette does not include the 3′ TTTTTG sequence;
16) In some cases, a cassette comprises the nucleotide sequence: tgcacacctcctggcgggcagctctgCTGCTGCTGCAGCAGCTGCTGtgttctggcaatacctgCAGCAGCAGCAGCAGCA GCAGCAgggaggcctgccctgactgcccacTTTTTG (SEQ ID NO:594; “CUG_235” in Table 7; FIG. 23). In some cases, the cassette does not include the 3′ TTTTTG sequence;
17) In some cases, a cassette comprises the nucleotide sequence: tgcacacctcctggcgggcagctctgCTGCTGCTGCAGCTACTGCTGtgttctggcaatacctgCAGCAGAAGCAGCAGCA GCAGCAgggaggcctgccctgactgcccacTTTTTG (SEQ ID NO:595; “CUG_244” in Table 7; FIG. 23). In some cases, the cassette does not include the 3′ TTTTTG sequence;
18) In some cases, a cassette comprises the nucleotide sequence: tgcacacctcctggcgggcagctctgCTGCTGCTGCAGCTGATGCTGtgttctggcaatacctgCAGCAACAGCAGCAGCA GCAGCAgggaggcctgccctgactgcccacTTTTTG (SEQ ID NO:596; “CUG_253” in Table 7; FIG. 23). In some cases, the cassette does not include the 3′ TTTTTG sequence;
19) In some cases, a cassette comprises the nucleotide sequence: tgcacacctcctggcgggcagctctgCTGCTGCAGCTGCTGCTGCTGtgttctggcaatacctgCAGCAGCAGCAGCAGCA GCAGCAgggaggcctgccctgactgcccacTTTTTG (SEQ ID NO:597; “CUG_NA-A” in Table 7; FIG. 23). In some cases, the cassette does not include the 3′ TTTTTG sequence;
20) In some cases, a cassette comprises the nucleotide sequence: tgcacacctcctggcgggcagctctgCTGCTGCAACTGCTGCTGCTGtgttctggcaatacctgCAGCAGCAGCAGAAGCA GCAGCAgggaggcctgccctgactgcccacTTTTTG (SEQ ID NO:598; “CUG_NA_B” in Table 7; FIG. 23). In some cases, the cassette does not include the 3′ TTTTTG sequence;
21) In some cases, a cassette comprises the nucleotide sequence: tgcacacctcctggcgggcagctctgCTGCTGCAGATGCTGCTGCTGtgttctggcaatacctgCAGCAGCAGCAACAGCA GCAGCAgggaggcctgccctgactgcccacTTTTTG (SEQ ID NO:599; “CUG_NA_C” in Table 7; FIG. 23). In some cases, the cassette does not include the 3′ TTTTTG sequence. In some cases, the cassette does not include the 3′ TTTTTG sequence;
22) In some cases, a cassette comprises the nucleotide sequence: tgcacacctcctggcgggcagctctgCTGCTGCAGCAGCTGCTGCTGtgttctggcaatacctgCAGCAGCAGCAGCAGCA GCAGCAgggaggcctgccctgactgcccacTTTTTG (SEQ ID NO:600; “CUG_NA_D” in Table 7; FIG. 23). In some cases, the cassette does not include the 3′ TTTTTG sequence;
23) In some cases, a cassette comprises the nucleotide sequence: tgcacacctcctggcgggcagctctgCTGCTGCAGCTACTGCTGCTGtgttctggcaatacctgCAGCAGCAGAAGCAGCA GCAGCAgggaggcctgccctgactgcccacTTTTTG (SEQ ID NO:601; “CUG_NA_E” in Table 7; FIG. 23). In some cases, the cassette does not include the 3′ TTTTTG sequence;
24) In some cases, a cassette comprises the nucleotide sequence: tgcacacctcctggcgggcagctctgCTGCTGCAGCTGATGCTGCTGtgttctggcaatacctgCAGCAGCAACAGCAGCA GCAGCAgggaggcctgccctgactgcccacTTTTTG (SEQ ID NO:602; “CUG_NA_F” in Table 7; FIG. 23). In some cases, the cassette does not include the 3′ TTTTTG sequence;
25) In some cases, a cassette comprises the nucleotide sequence: tgcacacctcctggcgggcagctctgCTGCTGCAGCTGCAGCTGCTGtgttctggcaatacctgCAGCAGCAGCAGCAGCA GCAGCAgggaggcctgccctgactgcccacTTTTTG (SEQ ID NO:603; “CUG_NA_G” in Table 7; FIG. 23). In some cases, the cassette does not include the 3′ TTTTTG sequence;
26) In some cases, a cassette comprises the nucleotide sequence: tgcacacctcctggcgggcagctctgCTGCTGCAGCTGCTACTGCTGtgttctggcaatacctgCAGCAGAAGCAGCAGCA GCAGCAgggaggcctgccctgactgcccacTTTTTG (SEQ ID NO:604; “CUG_NA_H” in Table 7; FIG. 23). In some cases, the cassette does not include the 3′ TTTTTG sequence;
27) In some cases, a cassette comprises the nucleotide sequence: tgcacacctcctggcgggcagctctgCTGCTGCAGCTGCTGATGCTGtgttctggcaatacctgCAGCAACAGCAGCAGCA GCAGCAgggaggcctgccctgactgcccacTTTTTG (SEQ ID NO:605; “CUG_NA_I” in Table 7; FIG. 23). In some cases, the cassette does not include the 3′ TTTTTG sequence;
28) In some cases, a cassette comprises the nucleotide sequence: tgcacacctcctggcgggcagctctgCTGCTGCTAAAGCTGCTGCTGtgttctggcaatacctgCAGCAGCAGCAAAAGCA GCAGCAgggaggcctgccctgactgcccacTTTTTG (SEQ ID NO:606; “CUG_307” in Table 7; FIG. 23). In some cases, the cassette does not include the 3′ TTTTTG sequence;
29) In some cases, a cassette comprises the nucleotide sequence: tgcacacctcctggcgggcagctctgCTGCTGCTAATACTGCTGCTGtgttctggcaatacctgCAGCAGCAGAAAAAGCA GCAGCAgggaggcctgccctgactgcccacTTTTTG (SEQ ID NO:607; “CUG_334” in Table 7; FIG. 23). In some cases, the cassette does not include the 3′ TTTTTG sequence;
30) In some cases, a cassette comprises the nucleotide sequence: tgcacacctcctggcgggcagctctgCTGCTGCTAATGATGCTGCTGtgttctggcaatacctgCAGCAGCAACAAAAGCA GCAGCAgggaggcctgccctgactgcccacTTTTTG (SEQ ID NO:608; “CUG_361” in Table 7; FIG. 23). In some cases, the cassette does not include the 3′ TTTTTG sequence;
31) In some cases, a cassette comprises the nucleotide sequence: tgcacacctcctggcgggcagctctgCTGCTGCTAATGCAGCTGCTGtgttctggcaatacctgCAGCAGCAGCAAAAGCA GCAGCAgggaggcctgccctgactgcccacTTTTTG (SEQ ID NO:609; “CUG_388” in Table 7; FIG. 23). In some cases, the cassette does not include the 3′ TTTTTG sequence;
32) In some cases, a cassette comprises the nucleotide sequence: tgcacacctcctggcgggcagctctgCTGCTGCTAATGCTACTGCTGtgttctggcaatacctgCAGCAGAAGCAAAAGCA GCAGCAgggaggcctgccctgactgcccacTTTTTG (SEQ ID NO:610; “CUG_415” in Table 7; FIG. 23). In some cases, the cassette does not include the 3′ TTTTTG sequence;
33) In some cases, a cassette comprises the nucleotide sequence: tgcacacctcctggcgggcagctctgCTGCTGCTACAGATGCTGCTGtgttctggcaatacctgCAGCAGCAACAGAAGCA GCAGCAgggaggcctgccctgactgcccacTTTTTG (SEQ ID NO:611; “CUG_631” in Table 7; FIG. 23). In some cases, the cassette does not include the 3′ TTTTTG sequence;
34) In some cases, a cassette comprises the nucleotide sequence: tgcacacctcctggcgggcagctctgCTGCTGCTACAGCAGCTGCTGtgttctggcaatacctgCAGCAGCAGCAGAAGCA GCAGCAgggaggcctgccctgactgcccacTTTTTG (SEQ ID NO:612; “CUG_658” in Table 7; FIG. 23). In some cases, the cassette does not include the 3′ TTTTTG sequence;
35) In some cases, a cassette comprises the nucleotide sequence: tgcacacctcctggcgggcagctctgCTGCTGCTACAGCTGATGCTGtgttctggcaatacctgCAGCAACAGCAGAAGCA GCAGCAgggaggcctgccctgactgcccacTTTTTG (SEQ ID NO:613; “CUG_712” in Table 7; FIG. 23). In some cases, the cassette does not include the 3′ TTTTTG sequence;
36) In some cases, a cassette comprises the nucleotide sequence: tgcacacctcctggcgggcagctctgCTGCTGCTGAAGATGCTGCTGtgttctggcaatacctgCAGCAGCAACAACAGCA GCAGCAgggaggcctgccctgactgcccacTTTTTG (SEQ ID NO:614; “CUG_2116” in Table 7; FIG. 23). In some cases, the cassette does not include the 3′ TTTTTG sequence;
37) In some cases, a cassette comprises the nucleotide sequence: tgcacacctcctggcgggcagctctgCTGCTGCTGAAGCAGCTGCTGtgttctggcaatacctgCAGCAGCAGCAACAGCA GCAGCAgggaggcctgccctgactgcccacTTTTTG (SEQ ID NO:615; “CUG_2143” in Table 7; FIG. 23). In some cases, the cassette does not include the 3′ TTTTTG sequence;
38) In some cases, a cassette comprises the nucleotide sequence: tgcacacctcctggcgggcagctctgCTGCTGCTGAAGCTACTGCTGtgttctggcaatacctgCAGCAGAAGCAACAGCA GCAGCAgggaggcctgccctgactgcccacTTTTTG (SEQ ID NO:616; “CUG_2170” in Table 7; FIG. 23). In some cases, the cassette does not include the 3′ TTTTTG sequence;
39) In some cases, a cassette comprises the nucleotide sequence: tgcacacctcctggcgggcagctctgCTGCTGCTAATGCTGATGCTGtgttctggcaatacctgCAGCAACAGCAAAAGCA GCAGCAgggaggcctgccctgactgcccacTTTTTG (SEQ ID NO:617; “CUG_442” in Table 7; FIG. 23). In some cases, the cassette does not include the 3′ TTTTTG sequence;
40) In some cases, a cassette comprises the nucleotide sequence: tgcacacctcctggcgggcagctctgCTGCTGCTACAACTGCTGCTGtgttctggcaatacctgCAGCAGCAGAAGAAGCA GCAGCAgggaggcctgccctgactgcccacTTTTTG (SEQ ID NO:618; “CUG_604” in Table 7; FIG. 23). In some cases, the cassette does not include the 3′ TTTTTG sequence;
41) In some cases, a cassette comprises the nucleotide sequence: tgcacacctcctggcgggcagctctgCTGCTGCTACAGCTACTGCTGtgttctggcaatacctgCAGCAGAAGCAGAAGCA GCAGCAgggaggcctgccctgactgcccacTTTTTG (SEQ ID NO:619; “CUG_685” in Table 7; FIG. 23). In some cases, the cassette does not include the 3′ TTTTTG sequence;
42) In some cases, a cassette comprises the nucleotide sequence: tgcacacctcctggcgggcagctctgCTGCTGCTGAAACTGCTGCTGtgttctggcaatacctgCAGCAGCAGAAACAGCA GCAGCAgggaggcctgccctgactgcccacTTTTTG (SEQ ID NO:620; “CUG_2089” in Table 7; FIG. 23). In some cases, the cassette does not include the 3′ TTTTTG sequence;
43) In some cases, a cassette comprises the nucleotide sequence: tgcacacctcctggcgggcagctctgCTGCTGCTGAAGCTGATGCTGtgttctggcaatacctgCAGCAACAGCAACAGCA GCAGCAgggaggcctgccctgactgcccacTTTTTG (SEQ ID NO:621; “CUG_2197” in Table 7; FIG. 23). In some cases, the cassette does not include the 3′ TTTTTG sequence;
44) In some cases, a cassette comprises the nucleotide sequence: tgcacacctcctggcgggcagctctgCTGCTGCTAAAGATGCTGCTGtgttctggcaatacctgCAGCAGCAACAAAAGCA GCAGCAgggaggcctgccctgactgcccacTTTTTG (SEQ ID NO:622; “CUG_4870” in Table 7; FIG. 23). In some cases, the cassette does not include the 3′ TTTTTG sequence;
45) In some cases, a cassette comprises the nucleotide sequence: tgcacacctcctggcgggcagctctgCTGCTGCTACAGAAGCTGCTGtgttctggcaatacctgCAGCAGCAACAGAAGCA GCAGCAgggaggcctgccctgactgcccacTTTTTG (SEQ ID NO:623; “CUG_9973” in Table 7; FIG. 23). In some cases, the cassette does not include the 3′ TTTTTG sequence;
46) In some cases, a cassette comprises the nucleotide sequence: tgcacacctcctggcgggcagctctgCTGCTGCTACAGATGATGCTGtgttctggcaatacctgCAGCAACAACAGAAGCA GCAGCAgggaggcctgccctgactgcccacTTTTTG (SEQ ID NO:624; “CUG_1013” in Table 7; FIG. 23). In some cases, the cassette does not include the 3′ TTTTTG sequence;
47) In some cases, a cassette comprises the nucleotide sequence: tgcacacctcctggcgggcagctctgCTGCTGCTACAGCAGATGCTGtgttctggcaatacctgCAGCAACAGCAGAAGCA GCAGCAgggaggcctgccctgactgcccacTTTTTG (SEQ ID NO:625; “CUG_1070” in Table 7; FIG. 23). In some cases, the cassette does not include the 3′ TTTTTG sequence;
48) In some cases, a cassette comprises the nucleotide sequence: tgcacacctcctggcgggcagctctgCTGCTGCTGAAGATACTGCTGtgttctggcaatacctgCAGCAGAAACAACAGCA GCAGCAgggaggcctgccctgactgcccacTTTTTG (SEQ ID NO:626; “CUG_2341” in Table 7; FIG. 23). In some cases, the cassette does not include the 3′ TTTTTG sequence;
49) In some cases, a cassette comprises the nucleotide sequence: tgcacacctcctggcgggcagctctgCTGCTGCTGAAGCAACTGCTGtgttctggcaatacctgCAGCAGAAGCAACAGCA GCAGCAgggaggcctgccctgactgcccacTTTTTG (SEQ ID NO:627; “CUG_2398” in Table 7; FIG. 23). In some cases, the cassette does not include the 3′ TTTTTG sequence;
50) In some cases, a cassette comprises the nucleotide sequence: tgcacacctcctggcgggcagctctgCTGCTGCTAAAACTGCTGCTGtgttctggcaatacctgCAGCAGCAGAAAAAGCA GCAGCAgggaggcctgccctgactgcccacTTTTTG (SEQ ID NO:628; “CUG_4789” in Table 7; FIG. 23). In some cases, the cassette does not include the 3′ TTTTTG sequence;
51) In some cases, a cassette comprises the nucleotide sequence: tgcacacctcctggcgggcagctctgCTGCTGCTAAAGCAGCTGCTGtgttctggcaatacctgCAGCAGCAGCAAAAGCA GCAGCAgggaggcctgccctgactgcccacTTTTTG (SEQ ID NO:629; “CUG_4951” in Table 7; FIG. 23). In some cases, the cassette does not include the 3′ TTTTTG sequence;
52) In some cases, a cassette comprises the nucleotide sequence: tgcacacctcctggcgggcagctctgCTGCTGCTAAAGCTACTGCTGtgttctggcaatacctgCAGCAGAAGCAAAAGCA GCAGCAgggaggcctgccctgactgcccacTTTTTG (SEQ ID NO:630; “CUG_5032” in Table 7; FIG. 23). In some cases, the cassette does not include the 3′ TTTTTG sequence;
53) In some cases, a cassette comprises the nucleotide sequence: tgcacacctcctggcgggcagctctgCTGCTGCTAAAGCTGATGCTGtgttctggcaatacctgCAGCAACAGCAAAAGCA GCAGCAgggaggcctgccctgactgcccacTTTTTG (SEQ ID NO:631; “CUG_5113” in Table 7; FIG. 23). In some cases, the cassette does not include the 3′ TTTTTG sequence;
54) In some cases, a cassette comprises the nucleotide sequence: tgcacacctcctggcgggcagctctgCTGCTGCTAATAATGCTGCTGtgttctggcaatacctgCAGCAGCAAAAAAAGCA GCAGCAgggaggcctgccctgactgcccacTTTTTG (SEQ ID NO:632; “CUG_5599” in Table 7; FIG. 23). In some cases, the cassette does not include the 3′ TTTTTG sequence;
55) In some cases, a cassette comprises the nucleotide sequence: tgcacacctcctggcgggcagctctgCTGCTGCTAATACAGCTGCTGtgttctggcaatacctgCAGCAGCAGAAAAAGCA GCAGCAgggaggcctgccctgactgcccacTTTTTG (SEQ ID NO:633; “CUG_5680” in Table 7; FIG. 23). In some cases, the cassette does not include the 3′ TTTTTG sequence;
56) In some cases, a cassette comprises the nucleotide sequence: tgcacacctcctggcgggcagctctgCTGCTGCTAATACTACTGCTGtgttctggcaatacctgCAGCAGAAGAAAAAGCA GCAGCAgggaggcctgccctgactgcccacTTTTTG (SEQ ID NO:634 “CUG_5761” in Table 7; FIG. 23). In some cases, the cassette does not include the 3′ TTTTTG sequence;
57) In some cases, a cassette comprises the nucleotide sequence: tgcacacctcctggcgggcagctctgCTGCTGCTAATACTGATGCTGtgttctggcaatacctgCAGCAACAGAAAAAGCA GCAGCAgggaggcctgccctgactgcccacTTTTTG (SEQ ID NO:635; “CUG_5842” in Table 7; FIG. 23). In some cases, the cassette does not include the 3′ TTTTTG sequence;
58) In some cases, a cassette comprises the nucleotide sequence: tgcacacctcctggcgggcagctctgCTGCTGCTAATGAAGCTGCTGtgttctggcaatacctgCAGCAGCAACAAAAGCA GCAGCAgggaggcctgccctgactgcccacTTTTTG (SEQ ID NO:636; “CUG_6328” in Table 7; FIG. 23). In some cases, the cassette does not include the 3′ TTTTTG sequence;
59) In some cases, a cassette comprises the nucleotide sequence: tgcacacctcctggcgggcagctctgCTGCTGCTAATGATACTGCTGtgttctggcaatacctgCAGCAGAAACAAAAGCA GCAGCAgggaggcctgccctgactgcccacTTTTTG (SEQ ID NO:637; “CUG_6409” in Table 7; FIG. 23). In some cases, the cassette does not include the 3′ TTTTTG sequence;
60) In some cases, a cassette comprises the nucleotide sequence: tgcacacctcctggcgggcagctctgCTGCTGCTAATGATGATGCTGtgttctggcaatacctgCAGCAACAACAAAAGCA GCAGCAgggaggcctgccctgactgcccacTTTTTG (SEQ ID NO:638; “CUG_6490” in Table 7; FIG. 23). In some cases, the cassette does not include the 3′ TTTTTG sequence;
61) In some cases, a cassette comprises the nucleotide sequence: tgcacacctcctggcgggcagctctgCTGCTGCTAATGCAACTGCTGtgttctggcaatacctgCAGCAGAAGCAAAAGCA GCAGCAgggaggcctgccctgactgcccacTTTTTG (SEQ ID NO:639; “CUG_6976” in Table 7; FIG. 23). In some cases, the cassette does not include the 3′ TTTTTG sequence;
62) In some cases, a cassette comprises the nucleotide sequence: tgcacacctcctggcgggcagctctgCTGCTGCTAATGCAGATGCTGtgttctggcaatacctgCAGCAACAGCAAAAGCA GCAGCAgggaggcctgccctgactgcccacTTTTTG (SEQ ID NO:640; “CUG_7057” in Table 7; FIG. 23). In some cases, the cassette does not include the 3′ TTTTTG sequence;
63) In some cases, a cassette comprises the nucleotide sequence: tgcacacctcctggcgggcagctctgCTGCTGCTAATGCTAATGCTGtgttctggcaatacctgCAGCAAAAGCAAAAGCA GCAGCAgggaggcctgccctgactgcccacTTTTTG (SEQ ID NO:641; “CUG_7543” in Table 7; FIG. 23). In some cases, the cassette does not include the 3′ TTTTTG sequence;
64) In some cases, a cassette comprises the nucleotide sequence: tgcacacctcctggcgggcagctctgCTGCTGCTACAAATGCTGCTGtgttctggcaatacctgCAGCAGCAAAAGAAGCA GCAGCAgggaggcctgccctgactgcccacTTTTTG (SEQ ID NO:642; “CUG_9244” in Table 7; FIG. 23). In some cases, the cassette does not include the 3′ TTTTTG sequence;
65) In some cases, a cassette comprises the nucleotide sequence: tgcacacctcctggcgggcagctctgCTGCTGCTACAACAGCTGCTGtgttctggcaatacctgCAGCAGCAGAAGAAGCA GCAGCAgggaggcctgccctgactgcccacTTTTTG (SEQ ID NO:643; “CUG_9325” in Table 7; FIG. 23). In some cases, the cassette does not include the 3′ TTTTTG sequence;
66) In some cases, a cassette comprises the nucleotide sequence: tgcacacctcctggcgggcagctctgCTGCTGCTACAACTACTGCTGtgttctggcaatacctgCAGCAGAAGAAGAAGCA GCAGCAgggaggcctgccctgactgcccacTTTTTG (SEQ ID NO:644; “CUG_9406” in Table 7; FIG. 23). In some cases, the cassette does not include the 3′ TTTTTG sequence;
67) In some cases, a cassette comprises the nucleotide sequence: tgcacacctcctggcgggcagctctgCTGCTGCTACAACTGATGCTGtgttctggcaatacctgCAGCAACAGAAGAAGCA GCAGCAgggaggcctgccctgactgcccacTTTTTG (SEQ ID NO:645; “CUG_9487” in Table 7; FIG. 23). In some cases, the cassette does not include the 3′ TTTTTG sequence;
68) In some cases, a cassette comprises the nucleotide sequence: tgcacacctcctggcgggcagctctgCTGCTGCTACAGATACTGCTGtgttctggcaatacctgCAGCAGAAACAGAAGCA GCAGCAgggaggcctgccctgactgcccacTTTTTG (SEQ ID NO:646; “CUG_10054” in Table 7; FIG. 23). In some cases, the cassette does not include the 3′ TTTTTG sequence;
69) In some cases, a cassette comprises the nucleotide sequence: tgcacacctcctggcgggcagctctgCTGCTGCTACAGCAACTGCTGtgttctggcaatacctgCAGCAGAAGCAGAAGCA GCAGCAgggaggcctgccctgactgcccacTTTTTG (SEQ ID NO:647; “CUG_10621” in Table 7; FIG. 23). In some cases, the cassette does not include the 3′ TTTTTG sequence;
70) In some cases, a cassette comprises the nucleotide sequence: tgcacacctcctggcgggcagctctgCTGCTGCTACAGCTAATGCTGtgttctggcaatacctgCAGCAAAAGCAGAAGCA GCAGCAgggaggcctgccctgactgcccacTTTTTG (SEQ ID NO:648; “CUG_11188” in Table 7; FIG. 23). In some cases, the cassette does not include the 3′ TTTTTG sequence;
71) In some cases, a cassette comprises the nucleotide sequence: tgcacacctcctggcgggcagctctgCTGCTGCTGAAAATGCTGCTGtgttctggcaatacctgCAGCAGCAAAAACAGCA GCAGCAgggaggcctgccctgactgcccacTTTTTG (SEQ ID NO:649; “CUG_222609” in Table 7; FIG. 23). In some cases, the cassette does not include the 3′ TTTTTG sequence;
72) In some cases, a cassette comprises the nucleotide sequence: tgcacacctcctggcgggcagctctgCTGCTGCTGAAACAGCTGCTGtgttctggcaatacctgCAGCAGCAGAAACAGCA GCAGCAgggaggcctgccctgactgcccacTTTTTG (SEQ ID NO:650; “CUG_22690” in Table 7; FIG. 23). In some cases, the cassette does not include the 3′ TTTTTG sequence;
73) In some cases, a cassette comprises the nucleotide sequence: tgcacacctcctggcgggcagctctgCTGCTGCTGAAACTACTGCTGtgttctggcaatacctgCAGCAGAAGAAACAGCA GCAGCAgggaggcctgccctgactgcccacTTTTTG (SEQ ID NO:651; “CUG_22771” in Table 7; FIG. 23). In some cases, the cassette does not include the 3′ TTTTTG sequence;
74) In some cases, a cassette comprises the nucleotide sequence: tgcacacctcctggcgggcagctctgCTGCTGCTGAAACTGATGCTGtgttctggcaatacctgCAGCAACAGAAACAGCA GCAGCAgggaggcctgccctgactgcccacTTTTTG (SEQ ID NO:652; “CUG_22852” in Table 7; FIG. 23). In some cases, the cassette does not include the 3′ TTTTTG sequence;
75) In some cases, a cassette comprises the nucleotide sequence: tgcacacctcctggcgggcagctctgCTGCTGCTGAAGAAGCTGCTGtgttctggcaatacctgCAGCAGCAACAACAGCA GCAGCAgggaggcctgccctgactgcccacTTTTTG (SEQ ID NO:653; “CUG_233338” in Table 7; FIG. 23). In some cases, the cassette does not include the 3′ TTTTTG sequence;
76) In some cases, a cassette comprises the nucleotide sequence: tgcacacctcctggcgggcagctctgCTGCTGCTGAAGATGATGCTGtgttctggcaatacctgCAGCAACAACAACAGCA GCAGCAgggaggcctgccctgactgcccacTTTTTG (SEQ ID NO:654; “CUG_23500” in Table 7; FIG. 23). In some cases, the cassette does not include the 3′ TTTTTG sequence;
77) In some cases, a cassette comprises the nucleotide sequence: tgcacacctcctggcgggcagctctgCTGCTGCTGAAGCAGATGCTGtgttctggcaatacctgCAGCAACAGCAACAGCA GCAGCAgggaggcctgccctgactgcccacTTTTTG (SEQ ID NO:655; “CUG_24067” in Table 7; FIG. 23). In some cases, the cassette does not include the 3′ TTTTTG sequence;
78) In some cases, a cassette comprises the nucleotide sequence: tgcacacctcctggcgggcagctctgCTGCTGCTGAAGCTAATGCTGtgttctggcaatacctgCAGCAAAAGCAACAGCA GCAGCAgggaggcctgccctgactgcccacTTTTTG (SEQ ID NO:656; “CUG_24553” in Table 7; FIG. 23). In some cases, the cassette does not include the 3′ TTTTTG sequence.

[0208] The following are non-limiting examples of cassettes. In the following cassettes: pairs of 5′ flanking and 3′ flanking polynucleotides include: i) SEQ ID NO:854 and SEQ ID NO:855; ii) SEQ ID NO:856 and SEQ ID NO:857; and iii) SEQ ID NO:858 and SEQ ID NO:859. In some cases, the cassette includes a 3′ TTTTTG transcription termination sequence. In some cases, the cassette does not include a 3′ TTTTTG sequence. In some cases, the cassette includes, at the 3′ end, the nucleotide sequence Tₙ, where n is an integer from 5 to 10 (e.g., n is 5, 6, 7, 8, 9, or 10). In some cases, the cassette includes, at the 3′ end, the nucleotide sequence TTTTT. Non-limiting examples include the cassettes shown in FIG. 25.

1) In some cases, a cassette comprises, in order from 5′ to 3′: i) SEQ ID NO:854; ii) SEQ ID NO:379; iii) a sequence that is complementary to SEQ ID NO: 379, where the sequence can comprise from 0 to 10 mismatches (non-complementary nucleotides) to SEQ ID NO: 379; and iv) SEQ ID NO:855. In some cases, a cassette comprises, in order from 5′ to 3′: i) SEQ ID NO:856; ii) SEQ ID NO: 379; iii) a sequence that is complementary to SEQ ID NO: 379, where the sequence can comprise from 0 to 10 mismatches (non-complementary nucleotides) to SEQ ID NO: 379; and iv) SEQ ID NO:857. In some cases, a cassette comprises, in order from 5′ to 3′: i) SEQ ID NO:858; ii) SEQ ID NO: 379; iii) a sequence that is complementary to SEQ ID NO: 379, where the sequence can comprise from 0 to 10 mismatches (non-complementary nucleotides) to SEQ ID NO: 379; and iv) SEQ ID NO:859.
2) In some cases, a cassette comprises, in order from 5′ to 3′: i) SEQ ID NO:854; ii) SEQ ID NO:380; iii) a sequence that is complementary to SEQ ID NO: 380, where the sequence can comprise from 0 to 10 mismatches (non-complementary nucleotides) to SEQ ID NO: 380; and iv) SEQ ID NO:855. In some cases, a cassette comprises, in order from 5′ to 3′: i) SEQ ID NO:856; ii) SEQ ID NO: 380; iii) a sequence that is complementary to SEQ ID NO: 380, where the sequence can comprise from 0 to 10 mismatches (non-complementary nucleotides) to SEQ ID NO: 380; and iv) SEQ ID NO:857. In some cases, a cassette comprises, in order from 5′ to 3′: i) SEQ ID NO:858; ii) SEQ ID NO: 380; iii) a sequence that is complementary to SEQ ID NO: 380, where the sequence can comprise from 0 to 10 mismatches (non-complementary nucleotides) to SEQ ID NO: 380; and iv) SEQ ID NO:859.
3) In some cases, a cassette comprises, in order from 5′ to 3′: i) SEQ ID NO:854; ii) SEQ ID NO:381; iii) a sequence that is complementary to SEQ ID NO: 381, where the sequence can comprise from 0 to 10 mismatches (non-complementary nucleotides) to SEQ ID NO: 381; and iv) SEQ ID NO:855. In some cases, a cassette comprises, in order from 5′ to 3′: i) SEQ ID NO:856; ii) SEQ ID NO: 381; iii) a sequence that is complementary to SEQ ID NO: 381, where the sequence can comprise from 0 to 10 mismatches (non-complementary nucleotides) to SEQ ID NO: 381; and iv) SEQ ID NO:857. In some cases, a cassette comprises, in order from 5′ to 3′: i) SEQ ID NO:858; ii) SEQ ID NO: 381; iii) a sequence that is complementary to SEQ ID NO: 381, where the sequence can comprise from 0 to 10 mismatches (non-complementary nucleotides) to SEQ ID NO: 381; and iv) SEQ ID NO:859.
4) In some cases, a cassette comprises, in order from 5′ to 3′: i) SEQ ID NO:854; ii) SEQ ID NO:382; iii) a sequence that is complementary to SEQ ID NO: 382, where the sequence can comprise from 0 to 10 mismatches (non-complementary nucleotides) to SEQ ID NO: 382; and iv) SEQ ID NO:855. In some cases, a cassette comprises, in order from 5′ to 3′: i) SEQ ID NO:856; ii) SEQ ID NO: 382; iii) a sequence that is complementary to SEQ ID NO: 382, where the sequence can comprise from 0 to 10 mismatches (non-complementary nucleotides) to SEQ ID NO: 382; and iv) SEQ ID NO:857. In some cases, a cassette comprises, in order from 5′ to 3′: i) SEQ ID NO:858; ii) SEQ ID NO: 382; iii) a sequence that is complementary to SEQ ID NO: 382, where the sequence can comprise from 0 to 10 mismatches (non-complementary nucleotides) to SEQ ID NO: 382; and iv) SEQ ID NO:859.
5) In some cases, a cassette comprises, in order from 5′ to 3′: i) SEQ ID NO:854; ii) SEQ ID NO:383; iii) a sequence that is complementary to SEQ ID NO: 383, where the sequence can comprise from 0 to 10 mismatches (non-complementary nucleotides) to SEQ ID NO: 383; and iv) SEQ ID NO:855. In some cases, a cassette comprises, in order from 5′ to 3′: i) SEQ ID NO:856; ii) SEQ ID NO: 383; iii) a sequence that is complementary to SEQ ID NO: 383, where the sequence can comprise from 0 to 10 mismatches (non-complementary nucleotides) to SEQ ID NO: 383; and iv) SEQ ID NO:857. In some cases, a cassette comprises, in order from 5′ to 3′: i) SEQ ID NO:858; ii) SEQ ID NO: 383; iii) a sequence that is complementary to SEQ ID NO: 383, where the sequence can comprise from 0 to 10 mismatches (non-complementary nucleotides) to SEQ ID NO: 383; and iv) SEQ ID NO:859.
6) In some cases, a cassette comprises, in order from 5′ to 3′: i) SEQ ID NO:854; ii) SEQ ID NO:384; iii) a sequence that is complementary to SEQ ID NO: 384, where the sequence can comprise from 0 to 10 mismatches (non-complementary nucleotides) to SEQ ID NO: 384; and iv) SEQ ID NO:855. In some cases, a cassette comprises, in order from 5′ to 3′: i) SEQ ID NO:856; ii) SEQ ID NO: 384; iii) a sequence that is complementary to SEQ ID NO: 384, where the sequence can comprise from 0 to 10 mismatches (non-complementary nucleotides) to SEQ ID NO: 384; and iv) SEQ ID NO:857. In some cases, a cassette comprises, in order from 5′ to 3′: i) SEQ ID NO:858; ii) SEQ ID NO: 384; iii) a sequence that is complementary to SEQ ID NO: 384, where the sequence can comprise from 0 to 10 mismatches (non-complementary nucleotides) to SEQ ID NO: 384; and iv) SEQ ID NO:859.
7) In some cases, a cassette comprises, in order from 5′ to 3′: i) SEQ ID NO:854; ii) SEQ ID NO:385; iii) a sequence that is complementary to SEQ ID NO: 385, where the sequence can comprise from 0 to 10 mismatches (non-complementary nucleotides) to SEQ ID NO: 385; and iv) SEQ ID NO:855. In some cases, a cassette comprises, in order from 5′ to 3′: i) SEQ ID NO:856; ii) SEQ ID NO: 385; iii) a sequence that is complementary to SEQ ID NO: 385, where the sequence can comprise from 0 to 10 mismatches (non-complementary nucleotides) to SEQ ID NO: 385; and iv) SEQ ID NO:857. In some cases, a cassette comprises, in order from 5′ to 3′: i) SEQ ID NO:858; ii) SEQ ID NO: 385; iii) a sequence that is complementary to SEQ ID NO: 385, where the sequence can comprise from 0 to 10 mismatches (non-complementary nucleotides) to SEQ ID NO: 385; and iv) SEQ ID NO:859.
8) In some cases, a cassette comprises, in order from 5′ to 3′: i) SEQ ID NO:854; ii) SEQ ID NO:386; iii) a sequence that is complementary to SEQ ID NO: 386, where the sequence can comprise from 0 to 10 mismatches (non-complementary nucleotides) to SEQ ID NO: 386; and iv) SEQ ID NO:855. In some cases, a cassette comprises, in order from 5′ to 3′: i) SEQ ID NO:856; ii) SEQ ID NO: 386; iii) a sequence that is complementary to SEQ ID NO: 386, where the sequence can comprise from 0 to 10 mismatches (non-complementary nucleotides) to SEQ ID NO: 386; and iv) SEQ ID NO:857. In some cases, a cassette comprises, in order from 5′ to 3′: i) SEQ ID NO:858; ii) SEQ ID NO: 386; iii) a sequence that is complementary to SEQ ID NO: 386, where the sequence can comprise from 0 to 10 mismatches (non-complementary nucleotides) to SEQ ID NO: 386; and iv) SEQ ID NO:859.
9) In some cases, a cassette comprises, in order from 5′ to 3′: i) SEQ ID NO:854; ii) SEQ ID NO:387; iii) a sequence that is complementary to SEQ ID NO: 387, where the sequence can comprise from 0 to 10 mismatches (non-complementary nucleotides) to SEQ ID NO: 387; and iv) SEQ ID NO:855. In some cases, a cassette comprises, in order from 5′ to 3′: i) SEQ ID NO:856; ii) SEQ ID NO: 387; iii) a sequence that is complementary to SEQ ID NO: 387, where the sequence can comprise from 0 to 10 mismatches (non-complementary nucleotides) to SEQ ID NO: 387; and iv) SEQ ID NO:857. In some cases, a cassette comprises, in order from 5′ to 3′: i) SEQ ID NO:858; ii) SEQ ID NO: 387; iii) a sequence that is complementary to SEQ ID NO: 387, where the sequence can comprise from 0 to 10 mismatches (non-complementary nucleotides) to SEQ ID NO: 387; and iv) SEQ ID NO:859.
10) In some cases, a cassette comprises, in order from 5′ to 3′: i) SEQ ID NO:854; ii) SEQ ID NO:388; iii) a sequence that is complementary to SEQ ID NO: 388, where the sequence can comprise from 0 to 10 mismatches (non-complementary nucleotides) to SEQ ID NO: 388; and iv) SEQ ID NO:855. In some cases, a cassette comprises, in order from 5′ to 3′: i) SEQ ID NO:856; ii) SEQ ID NO: 388; iii) a sequence that is complementary to SEQ ID NO: 388, where the sequence can comprise from 0 to 10 mismatches (non-complementary nucleotides) to SEQ ID NO: 388; and iv) SEQ ID NO:857. In some cases, a cassette comprises, in order from 5′ to 3′: i) SEQ ID NO:858; ii) SEQ ID NO: 388; iii) a sequence that is complementary to SEQ ID NO: 388, where the sequence can comprise from 0 to 10 mismatches (non-complementary nucleotides) to SEQ ID NO: 388; and iv) SEQ ID NO:859.
11) In some cases, a cassette comprises, in order from 5′ to 3′: i) SEQ ID NO:854; ii) SEQ ID NO:389; iii) a sequence that is complementary to SEQ ID NO: 389, where the sequence can comprise from 0 to 10 mismatches (non-complementary nucleotides) to SEQ ID NO: 389; and iv) SEQ ID NO:855. In some cases, a cassette comprises, in order from 5′ to 3′: i) SEQ ID NO:856; ii) SEQ ID NO: 389; iii) a sequence that is complementary to SEQ ID NO: 389, where the sequence can comprise from 0 to 10 mismatches (non-complementary nucleotides) to SEQ ID NO: 389; and iv) SEQ ID NO:857. In some cases, a cassette comprises, in order from 5′ to 3′: i) SEQ ID NO:858; ii) SEQ ID NO: 389; iii) a sequence that is complementary to SEQ ID NO: 389, where the sequence can comprise from 0 to 10 mismatches (non-complementary nucleotides) to SEQ ID NO: 389; and iv) SEQ ID NO:859.
12) In some cases, a cassette comprises, in order from 5′ to 3′: i) SEQ ID NO:854; ii) SEQ ID NO:390; iii) a sequence that is complementary to SEQ ID NO: 390, where the sequence can comprise from 0 to 10 mismatches (non-complementary nucleotides) to SEQ ID NO: 390; and iv) SEQ ID NO:855. In some cases, a cassette comprises, in order from 5′ to 3′: i) SEQ ID NO:856; ii) SEQ ID NO: 390; iii) a sequence that is complementary to SEQ ID NO: 390, where the sequence can comprise from 0 to 10 mismatches (non-complementary nucleotides) to SEQ ID NO: 390; and iv) SEQ ID NO:857. In some cases, a cassette comprises, in order from 5′ to 3′: i) SEQ ID NO:858; ii) SEQ ID NO: 390; iii) a sequence that is complementary to SEQ ID NO: 309, where the sequence can comprise from 0 to 10 mismatches (non-complementary nucleotides) to SEQ ID NO: 390; and iv) SEQ ID NO:859.
13) In some cases, a cassette comprises, in order from 5′ to 3′: i) SEQ ID NO:854; ii) SEQ ID NO:391; iii) a sequence that is complementary to SEQ ID NO: 391, where the sequence can comprise from 0 to 10 mismatches (non-complementary nucleotides) to SEQ ID NO: 391; and iv) SEQ ID NO:855. In some cases, a cassette comprises, in order from 5′ to 3′: i) SEQ ID NO:856; ii) SEQ ID NO: 391; iii) a sequence that is complementary to SEQ ID NO: 391, where the sequence can comprise from 0 to 10 mismatches (non-complementary nucleotides) to SEQ ID NO: 391; and iv) SEQ ID NO:857. In some cases, a cassette comprises, in order from 5′ to 3′: i) SEQ ID NO:858; ii) SEQ ID NO: 391; iii) a sequence that is complementary to SEQ ID NO: 391, where the sequence can comprise from 0 to 10 mismatches (non-complementary nucleotides) to SEQ ID NO: 391; and iv) SEQ ID NO:859.
14) In some cases, a cassette comprises, in order from 5′ to 3′: i) SEQ ID NO:854; ii) SEQ ID NO:390; iii) a sequence that is complementary to SEQ ID NO: 390, where the sequence can comprise from 0 to 10 mismatches (non-complementary nucleotides) to SEQ ID NO: 390; and iv) SEQ ID NO:855. In some cases, a cassette comprises, in order from 5′ to 3′: i) SEQ ID NO:856; ii) SEQ ID NO: 390; iii) a sequence that is complementary to SEQ ID NO: 390, where the sequence can comprise from 0 to 10 mismatches (non-complementary nucleotides) to SEQ ID NO: 390; and iv) SEQ ID NO:857. In some cases, a cassette comprises, in order from 5′ to 3′: i) SEQ ID NO:858; ii) SEQ ID NO: 390; iii) a sequence that is complementary to SEQ ID NO: 390, where the sequence can comprise from 0 to 10 mismatches (non-complementary nucleotides) to SEQ ID NO: 390; and iv) SEQ ID NO:859.
15) In some cases, a cassette comprises, in order from 5′ to 3′: i) SEQ ID NO:854; ii) SEQ ID NO: 391; iii) a sequence that is complementary to SEQ ID NO: 391, where the sequence can comprise from 0 to 10 mismatches (non-complementary nucleotides) to SEQ ID NO: 391; and iv) SEQ ID NO:855. In some cases, a cassette comprises, in order from 5′ to 3′: i) SEQ ID NO:856; ii) SEQ ID NO: 391; iii) a sequence that is complementary to SEQ ID NO: 391, where the sequence can comprise from 0 to 10 mismatches (non-complementary nucleotides) to SEQ ID NO: 391; and iv) SEQ ID NO:857. In some cases, a cassette comprises, in order from 5′ to 3′: i) SEQ ID NO:858; ii) SEQ ID NO: 391; iii) a sequence that is complementary to SEQ ID NO: 391, where the sequence can comprise from 0 to 10 mismatches (non-complementary nucleotides) to SEQ ID NO: 391; and iv) SEQ ID NO:859.
16) In some cases, a cassette comprises, in order from 5′ to 3′: i) SEQ ID NO:854; ii) SEQ ID NO:392; iii) a sequence that is complementary to SEQ ID NO: 392, where the sequence can comprise from 0 to 10 mismatches (non-complementary nucleotides) to SEQ ID NO: 392; and iv) SEQ ID NO:855. In some cases, a cassette comprises, in order from 5′ to 3′: i) SEQ ID NO:856; ii) SEQ ID NO: 392; iii) a sequence that is complementary to SEQ ID NO: 392, where the sequence can comprise from 0 to 10 mismatches (non-complementary nucleotides) to SEQ ID NO: 392; and iv) SEQ ID NO:857. In some cases, a cassette comprises, in order from 5′ to 3′: i) SEQ ID NO:858; ii) SEQ ID NO: 392; iii) a sequence that is complementary to SEQ ID NO: 392, where the sequence can comprise from 0 to 10 mismatches (non-complementary nucleotides) to SEQ ID NO: 392; and iv) SEQ ID NO:859.
17) In some cases, a cassette comprises, in order from 5′ to 3′: i) SEQ ID NO:854; ii) SEQ ID NO:393; iii) a sequence that is complementary to SEQ ID NO: 393, where the sequence can comprise from 0 to 10 mismatches (non-complementary nucleotides) to SEQ ID NO: 393; and iv) SEQ ID NO:855. In some cases, a cassette comprises, in order from 5′ to 3′: i) SEQ ID NO:856; ii) SEQ ID NO: 393; iii) a sequence that is complementary to SEQ ID NO: 393, where the sequence can comprise from 0 to 10 mismatches (non-complementary nucleotides) to SEQ ID NO: 393; and iv) SEQ ID NO:857. In some cases, a cassette comprises, in order from 5′ to 3′: i) SEQ ID NO:858; ii) SEQ ID NO: 393; iii) a sequence that is complementary to SEQ ID NO: 393, where the sequence can comprise from 0 to 10 mismatches (non-complementary nucleotides) to SEQ ID NO: 393; and iv) SEQ ID NO:859.
18) In some cases, a cassette comprises, in order from 5′ to 3′: i) SEQ ID NO:854; ii) SEQ ID NO:394; iii) a sequence that is complementary to SEQ ID NO: 394, where the sequence can comprise from 0 to 10 mismatches (non-complementary nucleotides) to SEQ ID NO: 394; and iv) SEQ ID NO:855. In some cases, a cassette comprises, in order from 5′ to 3′: i) SEQ ID NO:856; ii) SEQ ID NO: 394; iii) a sequence that is complementary to SEQ ID NO: 394, where the sequence can comprise from 0 to 10 mismatches (non-complementary nucleotides) to SEQ ID NO: 394; and iv) SEQ ID NO:857. In some cases, a cassette comprises, in order from 5′ to 3′: i) SEQ ID NO:858; ii) SEQ ID NO: 394; iii) a sequence that is complementary to SEQ ID NO: 394, where the sequence can comprise from 0 to 10 mismatches (non-complementary nucleotides) to SEQ ID NO: 394; and iv) SEQ ID NO:859.
19) In some cases, a cassette comprises, in order from 5′ to 3′: i) SEQ ID NO:854; ii) SEQ ID NO:395; iii) a sequence that is complementary to SEQ ID NO: 395, where the sequence can comprise from 0 to 10 mismatches (non-complementary nucleotides) to SEQ ID NO: 395; and iv) SEQ ID NO:855. In some cases, a cassette comprises, in order from 5′ to 3′: i) SEQ ID NO:856; ii) SEQ ID NO: 395; iii) a sequence that is complementary to SEQ ID NO: 395, where the sequence can comprise from 0 to 10 mismatches (non-complementary nucleotides) to SEQ ID NO: 395; and iv) SEQ ID NO:857. In some cases, a cassette comprises, in order from 5′ to 3′: i) SEQ ID NO:858; ii) SEQ ID NO: 395; iii) a sequence that is complementary to SEQ ID NO: 395, where the sequence can comprise from 0 to 10 mismatches (non-complementary nucleotides) to SEQ ID NO: 395; and iv) SEQ ID NO:859.
20) In some cases, a cassette comprises, in order from 5′ to 3′: i) SEQ ID NO:854; ii) SEQ ID NO:396; iii) a sequence that is complementary to SEQ ID NO: 396, where the sequence can comprise from 0 to 10 mismatches (non-complementary nucleotides) to SEQ ID NO: 396; and iv) SEQ ID NO:855. In some cases, a cassette comprises, in order from 5′ to 3′: i) SEQ ID NO:856; ii) SEQ ID NO: 396; iii) a sequence that is complementary to SEQ ID NO: 396, where the sequence can comprise from 0 to 10 mismatches (non-complementary nucleotides) to SEQ ID NO: 396; and iv) SEQ ID NO:857. In some cases, a cassette comprises, in order from 5′ to 3′: i) SEQ ID NO:858; ii) SEQ ID NO: 396; iii) a sequence that is complementary to SEQ ID NO: 396, where the sequence can comprise from 0 to 10 mismatches (non-complementary nucleotides) to SEQ ID NO: 396; and iv) SEQ ID NO:859.
21) In some cases, a cassette comprises, in order from 5′ to 3′: i) SEQ ID NO:854; ii) SEQ ID NO:397; iii) a sequence that is complementary to SEQ ID NO: 397, where the sequence can comprise from 0 to 10 mismatches (non-complementary nucleotides) to SEQ ID NO: 397; and iv) SEQ ID NO:855. In some cases, a cassette comprises, in order from 5′ to 3′: i) SEQ ID NO:856; ii) SEQ ID NO: 397; iii) a sequence that is complementary to SEQ ID NO: 397, where the sequence can comprise from 0 to 10 mismatches (non-complementary nucleotides) to SEQ ID NO: 397; and iv) SEQ ID NO:857. In some cases, a cassette comprises, in order from 5′ to 3′: i) SEQ ID NO:858; ii) SEQ ID NO: 397; iii) a sequence that is complementary to SEQ ID NO: 397, where the sequence can comprise from 0 to 10 mismatches (non-complementary nucleotides) to SEQ ID NO: 397; and iv) SEQ ID NO:859.
22) In some cases, a cassette comprises, in order from 5′ to 3′: i) SEQ ID NO:854; ii) SEQ ID NO:398; iii) a sequence that is complementary to SEQ ID NO: 398, where the sequence can comprise from 0 to 10 mismatches (non-complementary nucleotides) to SEQ ID NO: 398; and iv) SEQ ID NO:855. In some cases, a cassette comprises, in order from 5′ to 3′: i) SEQ ID NO:856; ii) SEQ ID NO: 398; iii) a sequence that is complementary to SEQ ID NO: 398, where the sequence can comprise from 0 to 10 mismatches (non-complementary nucleotides) to SEQ ID NO: 398; and iv) SEQ ID NO:857. In some cases, a cassette comprises, in order from 5′ to 3′: i) SEQ ID NO:858; ii) SEQ ID NO: 398; iii) a sequence that is complementary to SEQ ID NO: 398, where the sequence can comprise from 0 to 10 mismatches (non-complementary nucleotides) to SEQ ID NO: 398; and iv) SEQ ID NO:859.
23) In some cases, a cassette comprises, in order from 5′ to 3′: i) SEQ ID NO:854; ii) SEQ ID NO:399; iii) a sequence that is complementary to SEQ ID NO: 399, where the sequence can comprise from 0 to 10 mismatches (non-complementary nucleotides) to SEQ ID NO: 399; and iv) SEQ ID NO:855. In some cases, a cassette comprises, in order from 5′ to 3′: i) SEQ ID NO:856; ii) SEQ ID NO: 399; iii) a sequence that is complementary to SEQ ID NO: 399, where the sequence can comprise from 0 to 10 mismatches (non-complementary nucleotides) to SEQ ID NO: 399; and iv) SEQ ID NO:857. In some cases, a cassette comprises, in order from 5′ to 3′: i) SEQ ID NO:858; ii) SEQ ID NO: 399; iii) a sequence that is complementary to SEQ ID NO: 399, where the sequence can comprise from 0 to 10 mismatches (non-complementary nucleotides) to SEQ ID NO: 399; and iv) SEQ ID NO:859.
24) In some cases, a cassette comprises, in order from 5′ to 3′: i) SEQ ID NO:854; ii) SEQ ID NO:400; iii) a sequence that is complementary to SEQ ID NO: 400, where the sequence can comprise from 0 to 10 mismatches (non-complementary nucleotides) to SEQ ID NO: 400; and iv) SEQ ID NO:855. In some cases, a cassette comprises, in order from 5′ to 3′: i) SEQ ID NO:856; ii) SEQ ID NO: 400; iii) a sequence that is complementary to SEQ ID NO: 400, where the sequence can comprise from 0 to 10 mismatches (non-complementary nucleotides) to SEQ ID NO: 400; and iv) SEQ ID NO:857. In some cases, a cassette comprises, in order from 5′ to 3′: i) SEQ ID NO:858; ii) SEQ ID NO: 400; iii) a sequence that is complementary to SEQ ID NO: 400, where the sequence can comprise from 0 to 10 mismatches (non-complementary nucleotides) to SEQ ID NO: 400; and iv) SEQ ID NO:859.
25) In some cases, a cassette comprises, in order from 5′ to 3′: i) SEQ ID NO:854; ii) SEQ ID NO:401; iii) a sequence that is complementary to SEQ ID NO: 401, where the sequence can comprise from 0 to 10 mismatches (non-complementary nucleotides) to SEQ ID NO: 401; and iv) SEQ ID NO:855. In some cases, a cassette comprises, in order from 5′ to 3′: i) SEQ ID NO:856; ii) SEQ ID NO: 401; iii) a sequence that is complementary to SEQ ID NO: 401, where the sequence can comprise from 0 to 10 mismatches (non-complementary nucleotides) to SEQ ID NO: 401; and iv) SEQ ID NO:857. In some cases, a cassette comprises, in order from 5′ to 3′: i) SEQ ID NO:858; ii) SEQ ID NO: 401; iii) a sequence that is complementary to SEQ ID NO: 401, where the sequence can comprise from 0 to 10 mismatches (non-complementary nucleotides) to SEQ ID NO: 401; and iv) SEQ ID NO:859.
26) In some cases, a cassette comprises, in order from 5′ to 3′: i) SEQ ID NO:854; ii) SEQ ID NO:402; iii) a sequence that is complementary to SEQ ID NO: 402, where the sequence can comprise from 0 to 10 mismatches (non-complementary nucleotides) to SEQ ID NO: 402; and iv) SEQ ID NO:855. In some cases, a cassette comprises, in order from 5′ to 3′: i) SEQ ID NO:856; ii) SEQ ID NO: 402; iii) a sequence that is complementary to SEQ ID NO: 402, where the sequence can comprise from 0 to 10 mismatches (non-complementary nucleotides) to SEQ ID NO: 402; and iv) SEQ ID NO:857. In some cases, a cassette comprises, in order from 5′ to 3′: i) SEQ ID NO:858; ii) SEQ ID NO: 402; iii) a sequence that is complementary to SEQ ID NO: 402, where the sequence can comprise from 0 to 10 mismatches (non-complementary nucleotides) to SEQ ID NO: 402; and iv) SEQ ID NO:859.
27) In some cases, a cassette comprises, in order from 5′ to 3′: i) SEQ ID NO:854; ii) SEQ ID NO:403; iii) a sequence that is complementary to SEQ ID NO: 403, where the sequence can comprise from 0 to 10 mismatches (non-complementary nucleotides) to SEQ ID NO: 403; and iv) SEQ ID NO:855. In some cases, a cassette comprises, in order from 5′ to 3′: i) SEQ ID NO:856; ii) SEQ ID NO: 403; iii) a sequence that is complementary to SEQ ID NO: 403, where the sequence can comprise from 0 to 10 mismatches (non-complementary nucleotides) to SEQ ID NO: 403; and iv) SEQ ID NO:857. In some cases, a cassette comprises, in order from 5′ to 3′: i) SEQ ID NO:858; ii) SEQ ID NO: 403; iii) a sequence that is complementary to SEQ ID NO: 403, where the sequence can comprise from 0 to 10 mismatches (non-complementary nucleotides) to SEQ ID NO: 403; and iv) SEQ ID NO:859.
28) In some cases, a cassette comprises, in order from 5′ to 3′: i) SEQ ID NO:854; ii) SEQ ID NO:404; iii) a sequence that is complementary to SEQ ID NO: 404, where the sequence can comprise from 0 to 10 mismatches (non-complementary nucleotides) to SEQ ID NO: 404; and iv) SEQ ID NO:855. In some cases, a cassette comprises, in order from 5′ to 3′: i) SEQ ID NO:856; ii) SEQ ID NO: 404; iii) a sequence that is complementary to SEQ ID NO: 404, where the sequence can comprise from 0 to 10 mismatches (non-complementary nucleotides) to SEQ ID NO: 404; and iv) SEQ ID NO:857. In some cases, a cassette comprises, in order from 5′ to 3′: i) SEQ ID NO:858; ii) SEQ ID NO: 404; iii) a sequence that is complementary to SEQ ID NO: 404, where the sequence can comprise from 0 to 10 mismatches (non-complementary nucleotides) to SEQ ID NO: 404; and iv) SEQ ID NO:859.
29) In some cases, a cassette comprises, in order from 5′ to 3′: i) SEQ ID NO:854; ii) SEQ ID NO:405; iii) a sequence that is complementary to SEQ ID NO: 405, where the sequence can comprise from 0 to 10 mismatches (non-complementary nucleotides) to SEQ ID NO: 405; and iv) SEQ ID NO:855. In some cases, a cassette comprises, in order from 5′ to 3′: i) SEQ ID NO:856; ii) SEQ ID NO: 405; iii) a sequence that is complementary to SEQ ID NO: 405, where the sequence can comprise from 0 to 10 mismatches (non-complementary nucleotides) to SEQ ID NO: 405; and iv) SEQ ID NO:857. In some cases, a cassette comprises, in order from 5′ to 3′: i) SEQ ID NO:858; ii) SEQ ID NO: 405; iii) a sequence that is complementary to SEQ ID NO: 405, where the sequence can comprise from 0 to 10 mismatches (non-complementary nucleotides) to SEQ ID NO: 405; and iv) SEQ ID NO:859.
30) In some cases, a cassette comprises, in order from 5′ to 3′: i) SEQ ID NO:854; ii) SEQ ID NO:406; iii) a sequence that is complementary to SEQ ID NO: 406, where the sequence can comprise from 0 to 10 mismatches (non-complementary nucleotides) to SEQ ID NO: 406; and iv) SEQ ID NO:855. In some cases, a cassette comprises, in order from 5′ to 3′: i) SEQ ID NO:856; ii) SEQ ID NO: 406; iii) a sequence that is complementary to SEQ ID NO: 406, where the sequence can comprise from 0 to 10 mismatches (non-complementary nucleotides) to SEQ ID NO: 406; and iv) SEQ ID NO:857. In some cases, a cassette comprises, in order from 5′ to 3′: i) SEQ ID NO:858; ii) SEQ ID NO: 406; iii) a sequence that is complementary to SEQ ID NO: 406, where the sequence can comprise from 0 to 10 mismatches (non-complementary nucleotides) to SEQ ID NO: 406; and iv) SEQ ID NO:859.
31) In some cases, a cassette comprises, in order from 5′ to 3′: i) SEQ ID NO:854; ii) SEQ ID NO:407; iii) a sequence that is complementary to SEQ ID NO: 407, where the sequence can comprise from 0 to 10 mismatches (non-complementary nucleotides) to SEQ ID NO: 407; and iv) SEQ ID NO:855. In some cases, a cassette comprises, in order from 5′ to 3′: i) SEQ ID NO:856; ii) SEQ ID NO: 407; iii) a sequence that is complementary to SEQ ID NO: 407, where the sequence can comprise from 0 to 10 mismatches (non-complementary nucleotides) to SEQ ID NO: 407; and iv) SEQ ID NO:857. In some cases, a cassette comprises, in order from 5′ to 3′: i) SEQ ID NO:858; ii) SEQ ID NO: 407; iii) a sequence that is complementary to SEQ ID NO: 407, where the sequence can comprise from 0 to 10 mismatches (non-complementary nucleotides) to SEQ ID NO: 407; and iv) SEQ ID NO:859.
32) In some cases, a cassette comprises, in order from 5′ to 3′: i) SEQ ID NO:854; ii) SEQ ID NO:408; iii) a sequence that is complementary to SEQ ID NO: 408, where the sequence can comprise from 0 to 10 mismatches (non-complementary nucleotides) to SEQ ID NO: 408; and iv) SEQ ID NO:855. In some cases, a cassette comprises, in order from 5′ to 3′: i) SEQ ID NO:856; ii) SEQ ID NO: 408; iii) a sequence that is complementary to SEQ ID NO: 408, where the sequence can comprise from 0 to 10 mismatches (non-complementary nucleotides) to SEQ ID NO: 408; and iv) SEQ ID NO:857. In some cases, a cassette comprises, in order from 5′ to 3′: i) SEQ ID NO:858; ii) SEQ ID NO: 408; iii) a sequence that is complementary to SEQ ID NO: 408, where the sequence can comprise from 0 to 10 mismatches (non-complementary nucleotides) to SEQ ID NO: 408; and iv) SEQ ID NO:859.
33) In some cases, a cassette comprises, in order from 5′ to 3′: i) SEQ ID NO:854; ii) SEQ ID NO:409; iii) a sequence that is complementary to SEQ ID NO: 409, where the sequence can comprise from 0 to 10 mismatches (non-complementary nucleotides) to SEQ ID NO: 409; and iv) SEQ ID NO:855. In some cases, a cassette comprises, in order from 5′ to 3′: i) SEQ ID NO:856; ii) SEQ ID NO: 409; iii) a sequence that is complementary to SEQ ID NO: 409, where the sequence can comprise from 0 to 10 mismatches (non-complementary nucleotides) to SEQ ID NO: 409; and iv) SEQ ID NO:857. In some cases, a cassette comprises, in order from 5′ to 3′: i) SEQ ID NO:858; ii) SEQ ID NO: 409; iii) a sequence that is complementary to SEQ ID NO: 409, where the sequence can comprise from 0 to 10 mismatches (non-complementary nucleotides) to SEQ ID NO: 409; and iv) SEQ ID NO:859.
34) In some cases, a cassette comprises, in order from 5′ to 3′: i) SEQ ID NO:854; ii) SEQ ID NO:410; iii) a sequence that is complementary to SEQ ID NO: 410, where the sequence can comprise from 0 to 10 mismatches (non-complementary nucleotides) to SEQ ID NO: 410; and iv) SEQ ID NO:855. In some cases, a cassette comprises, in order from 5′ to 3′: i) SEQ ID NO:856; ii) SEQ ID NO: 410; iii) a sequence that is complementary to SEQ ID NO: 410, where the sequence can comprise from 0 to 10 mismatches (non-complementary nucleotides) to SEQ ID NO: 410; and iv) SEQ ID NO:857. In some cases, a cassette comprises, in order from 5′ to 3′: i) SEQ ID NO:858; ii) SEQ ID NO: 410; iii) a sequence that is complementary to SEQ ID NO: 410, where the sequence can comprise from 0 to 10 mismatches (non-complementary nucleotides) to SEQ ID NO: 410; and iv) SEQ ID NO:859.
35) In some cases, a cassette comprises, in order from 5′ to 3′: i) SEQ ID NO:854; ii) SEQ ID NO:411; iii) a sequence that is complementary to SEQ ID NO: 411, where the sequence can comprise from 0 to 10 mismatches (non-complementary nucleotides) to SEQ ID NO: 411; and iv) SEQ ID NO:855. In some cases, a cassette comprises, in order from 5′ to 3′: i) SEQ ID NO:856; ii) SEQ ID NO: 411; iii) a sequence that is complementary to SEQ ID NO: 411, where the sequence can comprise from 0 to 10 mismatches (non-complementary nucleotides) to SEQ ID NO: 411; and iv) SEQ ID NO:857. In some cases, a cassette comprises, in order from 5′ to 3′: i) SEQ ID NO:858; ii) SEQ ID NO: 411; iii) a sequence that is complementary to SEQ ID NO: 411, where the sequence can comprise from 0 to 10 mismatches (non-complementary nucleotides) to SEQ ID NO: 411; and iv) SEQ ID NO:859.
36) In some cases, a cassette comprises, in order from 5′ to 3′: i) SEQ ID NO:854; ii) SEQ ID NO:412; iii) a sequence that is complementary to SEQ ID NO: 412, where the sequence can comprise from 0 to 10 mismatches (non-complementary nucleotides) to SEQ ID NO: 412; and iv) SEQ ID NO:855. In some cases, a cassette comprises, in order from 5′ to 3′: i) SEQ ID NO:856; ii) SEQ ID NO: 412; iii) a sequence that is complementary to SEQ ID NO: 412, where the sequence can comprise from 0 to 10 mismatches (non-complementary nucleotides) to SEQ ID NO: 412; and iv) SEQ ID NO:857. In some cases, a cassette comprises, in order from 5′ to 3′: i) SEQ ID NO:858; ii) SEQ ID NO: 412; iii) a sequence that is complementary to SEQ ID NO: 412, where the sequence can comprise from 0 to 10 mismatches (non-complementary nucleotides) to SEQ ID NO: 412; and iv) SEQ ID NO:859.
37) In some cases, a cassette comprises, in order from 5′ to 3′: i) SEQ ID NO:854; ii) SEQ ID NO:413; iii) a sequence that is complementary to SEQ ID NO: 413, where the sequence can comprise from 0 to 10 mismatches (non-complementary nucleotides) to SEQ ID NO: 413; and iv) SEQ ID NO:855. In some cases, a cassette comprises, in order from 5′ to 3′: i) SEQ ID NO:856; ii) SEQ ID NO: 413; iii) a sequence that is complementary to SEQ ID NO: 413, where the sequence can comprise from 0 to 10 mismatches (non-complementary nucleotides) to SEQ ID NO: 413; and iv) SEQ ID NO:857. In some cases, a cassette comprises, in order from 5′ to 3′: i) SEQ ID NO:858; ii) SEQ ID NO: 413; iii) a sequence that is complementary to SEQ ID NO: 413, where the sequence can comprise from 0 to 10 mismatches (non-complementary nucleotides) to SEQ ID NO: 413; and iv) SEQ ID NO:859.
38) In some cases, a cassette comprises, in order from 5′ to 3′: i) SEQ ID NO:854; ii) SEQ ID NO:414; iii) a sequence that is complementary to SEQ ID NO: 414, where the sequence can comprise from 0 to 10 mismatches (non-complementary nucleotides) to SEQ ID NO: 414; and iv) SEQ ID NO:855. In some cases, a cassette comprises, in order from 5′ to 3′: i) SEQ ID NO:856; ii) SEQ ID NO: 414; iii) a sequence that is complementary to SEQ ID NO: 414, where the sequence can comprise from 0 to 10 mismatches (non-complementary nucleotides) to SEQ ID NO: 414; and iv) SEQ ID NO:857. In some cases, a cassette comprises, in order from 5′ to 3′: i) SEQ ID NO:858; ii) SEQ ID NO: 414; iii) a sequence that is complementary to SEQ ID NO: 414, where the sequence can comprise from 0 to 10 mismatches (non-complementary nucleotides) to SEQ ID NO: 414; and iv) SEQ ID NO:859.
39) In some cases, a cassette comprises, in order from 5′ to 3′: i) SEQ ID NO:854; ii) SEQ ID NO:415; iii) a sequence that is complementary to SEQ ID NO: 415, where the sequence can comprise from 0 to 10 mismatches (non-complementary nucleotides) to SEQ ID NO: 415; and iv) SEQ ID NO:855. In some cases, a cassette comprises, in order from 5′ to 3′: i) SEQ ID NO:856; ii) SEQ ID NO: 415; iii) a sequence that is complementary to SEQ ID NO: 415, where the sequence can comprise from 0 to 10 mismatches (non-complementary nucleotides) to SEQ ID NO: 415; and iv) SEQ ID NO:857. In some cases, a cassette comprises, in order from 5′ to 3′: i) SEQ ID NO:858; ii) SEQ ID NO: 415; iii) a sequence that is complementary to SEQ ID NO: 415, where the sequence can comprise from 0 to 10 mismatches (non-complementary nucleotides) to SEQ ID NO: 415; and iv) SEQ ID NO:859.
40) In some cases, a cassette comprises, in order from 5′ to 3′: i) SEQ ID NO:854; ii) SEQ ID NO:416; iii) a sequence that is complementary to SEQ ID NO: 416, where the sequence can comprise from 0 to 10 mismatches (non-complementary nucleotides) to SEQ ID NO: 416; and iv) SEQ ID NO:855. In some cases, a cassette comprises, in order from 5′ to 3′: i) SEQ ID NO:856; ii) SEQ ID NO: 416; iii) a sequence that is complementary to SEQ ID NO: 416, where the sequence can comprise from 0 to 10 mismatches (non-complementary nucleotides) to SEQ ID NO: 416; and iv) SEQ ID NO:857. In some cases, a cassette comprises, in order from 5′ to 3′: i) SEQ ID NO:858; ii) SEQ ID NO: 416; iii) a sequence that is complementary to SEQ ID NO: 416, where the sequence can comprise from 0 to 10 mismatches (non-complementary nucleotides) to SEQ ID NO: 416; and iv) SEQ ID NO:859.
41) In some cases, a cassette comprises, in order from 5′ to 3′: i) SEQ ID NO:854; ii) SEQ ID NO:417; iii) a sequence that is complementary to SEQ ID NO: 417, where the sequence can comprise from 0 to 10 mismatches (non-complementary nucleotides) to SEQ ID NO: 417; and iv) SEQ ID NO:855. In some cases, a cassette comprises, in order from 5′ to 3′: i) SEQ ID NO:856; ii) SEQ ID NO: 417; iii) a sequence that is complementary to SEQ ID NO: 417, where the sequence can comprise from 0 to 10 mismatches (non-complementary nucleotides) to SEQ ID NO: 417; and iv) SEQ ID NO:857. In some cases, a cassette comprises, in order from 5′ to 3′: i) SEQ ID NO:858; ii) SEQ ID NO: 417; iii) a sequence that is complementary to SEQ ID NO: 417, where the sequence can comprise from 0 to 10 mismatches (non-complementary nucleotides) to SEQ ID NO: 417; and iv) SEQ ID NO:859.
42) In some cases, a cassette comprises, in order from 5′ to 3′: i) SEQ ID NO:854; ii) SEQ ID NO:418; iii) a sequence that is complementary to SEQ ID NO: 418, where the sequence can comprise from 0 to 10 mismatches (non-complementary nucleotides) to SEQ ID NO: 418; and iv) SEQ ID NO:855. In some cases, a cassette comprises, in order from 5′ to 3′: i) SEQ ID NO:856; ii) SEQ ID NO: 418; iii) a sequence that is complementary to SEQ ID NO: 418, where the sequence can comprise from 0 to 10 mismatches (non-complementary nucleotides) to SEQ ID NO: 418; and iv) SEQ ID NO:857. In some cases, a cassette comprises, in order from 5′ to 3′: i) SEQ ID NO:858; ii) SEQ ID NO: 418; iii) a sequence that is complementary to SEQ ID NO: 418, where the sequence can comprise from 0 to 10 mismatches (non-complementary nucleotides) to SEQ ID NO: 418; and iv) SEQ ID NO:859.
43) In some cases, a cassette comprises, in order from 5′ to 3′: i) SEQ ID NO:854; ii) SEQ ID NO:419; iii) a sequence that is complementary to SEQ ID NO: 419, where the sequence can comprise from 0 to 10 mismatches (non-complementary nucleotides) to SEQ ID NO: 419; and iv) SEQ ID NO:855. In some cases, a cassette comprises, in order from 5′ to 3′: i) SEQ ID NO:856; ii) SEQ ID NO: 419; iii) a sequence that is complementary to SEQ ID NO: 419, where the sequence can comprise from 0 to 10 mismatches (non-complementary nucleotides) to SEQ ID NO: 419; and iv) SEQ ID NO:857. In some cases, a cassette comprises, in order from 5′ to 3′: i) SEQ ID NO:858; ii) SEQ ID NO: 419; iii) a sequence that is complementary to SEQ ID NO: 419, where the sequence can comprise from 0 to 10 mismatches (non-complementary nucleotides) to SEQ ID NO: 419; and iv) SEQ ID NO:859.
44) In some cases, a cassette comprises, in order from 5′ to 3′: i) SEQ ID NO:854; ii) SEQ ID NO:420; iii) a sequence that is complementary to SEQ ID NO: 420, where the sequence can comprise from 0 to 10 mismatches (non-complementary nucleotides) to SEQ ID NO: 420; and iv) SEQ ID NO:855. In some cases, a cassette comprises, in order from 5′ to 3′: i) SEQ ID NO:856; ii) SEQ ID NO: 420; iii) a sequence that is complementary to SEQ ID NO: 420, where the sequence can comprise from 0 to 10 mismatches (non-complementary nucleotides) to SEQ ID NO: 420; and iv) SEQ ID NO:857. In some cases, a cassette comprises, in order from 5′ to 3′: i) SEQ ID NO:858; ii) SEQ ID NO: 420; iii) a sequence that is complementary to SEQ ID NO: 420, where the sequence can comprise from 0 to 10 mismatches (non-complementary nucleotides) to SEQ ID NO: 420; and iv) SEQ ID NO:859.
45) In some cases, a cassette comprises, in order from 5′ to 3′: i) SEQ ID NO:854; ii) SEQ ID NO:421; iii) a sequence that is complementary to SEQ ID NO: 421, where the sequence can comprise from 0 to 10 mismatches (non-complementary nucleotides) to SEQ ID NO: 421; and iv) SEQ ID NO:855. In some cases, a cassette comprises, in order from 5′ to 3′: i) SEQ ID NO:856; ii) SEQ ID NO: 421; iii) a sequence that is complementary to SEQ ID NO: 421, where the sequence can comprise from 0 to 10 mismatches (non-complementary nucleotides) to SEQ ID NO: 421; and iv) SEQ ID NO:857. In some cases, a cassette comprises, in order from 5′ to 3′: i) SEQ ID NO:858; ii) SEQ ID NO: 421; iii) a sequence that is complementary to SEQ ID NO: 421, where the sequence can comprise from 0 to 10 mismatches (non-complementary nucleotides) to SEQ ID NO: 421; and iv) SEQ ID NO:859.
46) In some cases, a cassette comprises, in order from 5′ to 3′: i) SEQ ID NO:854; ii) SEQ ID NO:422; iii) a sequence that is complementary to SEQ ID NO: 422, where the sequence can comprise from 0 to 10 mismatches (non-complementary nucleotides) to SEQ ID NO: 422; and iv) SEQ ID NO:855. In some cases, a cassette comprises, in order from 5′ to 3′: i) SEQ ID NO:856; ii) SEQ ID NO: 422; iii) a sequence that is complementary to SEQ ID NO: 422, where the sequence can comprise from 0 to 10 mismatches (non-complementary nucleotides) to SEQ ID NO: 422; and iv) SEQ ID NO:857. In some cases, a cassette comprises, in order from 5′ to 3′: i) SEQ ID NO:858; ii) SEQ ID NO: 422; iii) a sequence that is complementary to SEQ ID NO: 422, where the sequence can comprise from 0 to 10 mismatches (non-complementary nucleotides) to SEQ ID NO: 422; and iv) SEQ ID NO:859.
47) In some cases, a cassette comprises, in order from 5′ to 3′: i) SEQ ID NO:854; ii) SEQ ID NO:423; iii) a sequence that is complementary to SEQ ID NO: 423, where the sequence can comprise from 0 to 10 mismatches (non-complementary nucleotides) to SEQ ID NO: 423; and iv) SEQ ID NO:855. In some cases, a cassette comprises, in order from 5′ to 3′: i) SEQ ID NO:856; ii) SEQ ID NO: 423; iii) a sequence that is complementary to SEQ ID NO: 423, where the sequence can comprise from 0 to 10 mismatches (non-complementary nucleotides) to SEQ ID NO: 423; and iv) SEQ ID NO:857. In some cases, a cassette comprises, in order from 5′ to 3′: i) SEQ ID NO:858; ii) SEQ ID NO: 423; iii) a sequence that is complementary to SEQ ID NO: 423, where the sequence can comprise from 0 to 10 mismatches (non-complementary nucleotides) to SEQ ID NO: 423; and iv) SEQ ID NO:859.
48) In some cases, a cassette comprises, in order from 5′ to 3′: i) SEQ ID NO:854; ii) SEQ ID NO:424; iii) a sequence that is complementary to SEQ ID NO: 424, where the sequence can comprise from 0 to 10 mismatches (non-complementary nucleotides) to SEQ ID NO: 424; and iv) SEQ ID NO:855. In some cases, a cassette comprises, in order from 5′ to 3′: i) SEQ ID NO:856; ii) SEQ ID NO: 424; iii) a sequence that is complementary to SEQ ID NO: 424, where the sequence can comprise from 0 to 10 mismatches (non-complementary nucleotides) to SEQ ID NO: 424; and iv) SEQ ID NO:857. In some cases, a cassette comprises, in order from 5′ to 3′: i) SEQ ID NO:858; ii) SEQ ID NO: 424; iii) a sequence that is complementary to SEQ ID NO: 424, where the sequence can comprise from 0 to 10 mismatches (non-complementary nucleotides) to SEQ ID NO: 424; and iv) SEQ ID NO:859.
49) In some cases, a cassette comprises, in order from 5′ to 3′: i) SEQ ID NO:854; ii) SEQ ID NO:425; iii) a sequence that is complementary to SEQ ID NO: 425, where the sequence can comprise from 0 to 10 mismatches (non-complementary nucleotides) to SEQ ID NO: 425; and iv) SEQ ID NO:855. In some cases, a cassette comprises, in order from 5′ to 3′: i) SEQ ID NO:856; ii) SEQ ID NO: 425; iii) a sequence that is complementary to SEQ ID NO: 425, where the sequence can comprise from 0 to 10 mismatches (non-complementary nucleotides) to SEQ ID NO: 425; and iv) SEQ ID NO:857. In some cases, a cassette comprises, in order from 5′ to 3′: i) SEQ ID NO:858; ii) SEQ ID NO: 425; iii) a sequence that is complementary to SEQ ID NO: 425, where the sequence can comprise from 0 to 10 mismatches (non-complementary nucleotides) to SEQ ID NO: 425; and iv) SEQ ID NO:859.
50) In some cases, a cassette comprises, in order from 5′ to 3′: i) SEQ ID NO:854; ii) SEQ ID NO:426; iii) a sequence that is complementary to SEQ ID NO: 426, where the sequence can comprise from 0 to 10 mismatches (non-complementary nucleotides) to SEQ ID NO: 426; and iv) SEQ ID NO:855. In some cases, a cassette comprises, in order from 5′ to 3′: i) SEQ ID NO:856; ii) SEQ ID NO: 426; iii) a sequence that is complementary to SEQ ID NO: 426, where the sequence can comprise from 0 to 10 mismatches (non-complementary nucleotides) to SEQ ID NO: 426; and iv) SEQ ID NO:857. In some cases, a cassette comprises, in order from 5′ to 3′: i) SEQ ID NO:858; ii) SEQ ID NO: 426; iii) a sequence that is complementary to SEQ ID NO: 426, where the sequence can comprise from 0 to 10 mismatches (non-complementary nucleotides) to SEQ ID NO: 426; and iv) SEQ ID NO:859.
51) In some cases, a cassette comprises, in order from 5′ to 3′: i) SEQ ID NO:854; ii) SEQ ID NO:427; iii) a sequence that is complementary to SEQ ID NO: 427, where the sequence can comprise from 0 to 10 mismatches (non-complementary nucleotides) to SEQ ID NO: 427; and iv) SEQ ID NO:855. In some cases, a cassette comprises, in order from 5′ to 3′: i) SEQ ID NO:856; ii) SEQ ID NO: 427; iii) a sequence that is complementary to SEQ ID NO: 427, where the sequence can comprise from 0 to 10 mismatches (non-complementary nucleotides) to SEQ ID NO: 427; and iv) SEQ ID NO:857. In some cases, a cassette comprises, in order from 5′ to 3′: i) SEQ ID NO:858; ii) SEQ ID NO: 427; iii) a sequence that is complementary to SEQ ID NO: 427, where the sequence can comprise from 0 to 10 mismatches (non-complementary nucleotides) to SEQ ID NO: 427; and iv) SEQ ID NO:859.
52) In some cases, a cassette comprises, in order from 5′ to 3′: i) SEQ ID NO:854; ii) SEQ ID NO:428; iii) a sequence that is complementary to SEQ ID NO: 428, where the sequence can comprise from 0 to 10 mismatches (non-complementary nucleotides) to SEQ ID NO: 428; and iv) SEQ ID NO:855. In some cases, a cassette comprises, in order from 5′ to 3′: i) SEQ ID NO:856; ii) SEQ ID NO: 428; iii) a sequence that is complementary to SEQ ID NO: 428, where the sequence can comprise from 0 to 10 mismatches (non-complementary nucleotides) to SEQ ID NO: 428; and iv) SEQ ID NO:857. In some cases, a cassette comprises, in order from 5′ to 3′: i) SEQ ID NO:858; ii) SEQ ID NO: 428; iii) a sequence that is complementary to SEQ ID NO: 428, where the sequence can comprise from 0 to 10 mismatches (non-complementary nucleotides) to SEQ ID NO: 428; and iv) SEQ ID NO:859.
53) In some cases, a cassette comprises, in order from 5′ to 3′: i) SEQ ID NO:854; ii) SEQ ID NO:429; iii) a sequence that is complementary to SEQ ID NO: 429, where the sequence can comprise from 0 to 10 mismatches (non-complementary nucleotides) to SEQ ID NO: 429; and iv) SEQ ID NO:855. In some cases, a cassette comprises, in order from 5′ to 3′: i) SEQ ID NO:856; ii) SEQ ID NO: 429; iii) a sequence that is complementary to SEQ ID NO: 429, where the sequence can comprise from 0 to 10 mismatches (non-complementary nucleotides) to SEQ ID NO: 429; and iv) SEQ ID NO:857. In some cases, a cassette comprises, in order from 5′ to 3′: i) SEQ ID NO:858; ii) SEQ ID NO: 429; iii) a sequence that is complementary to SEQ ID NO: 429, where the sequence can comprise from 0 to 10 mismatches (non-complementary nucleotides) to SEQ ID NO: 429; and iv) SEQ ID NO:859.
54) In some cases, a cassette comprises, in order from 5′ to 3′: i) SEQ ID NO:854; ii) SEQ ID NO:430; iii) a sequence that is complementary to SEQ ID NO: 430, where the sequence can comprise from 0 to 10 mismatches (non-complementary nucleotides) to SEQ ID NO: 430; and iv) SEQ ID NO:855. In some cases, a cassette comprises, in order from 5′ to 3′: i) SEQ ID NO:856; ii) SEQ ID NO: 430; iii) a sequence that is complementary to SEQ ID NO: 430, where the sequence can comprise from 0 to 10 mismatches (non-complementary nucleotides) to SEQ ID NO: 430; and iv) SEQ ID NO:857. In some cases, a cassette comprises, in order from 5′ to 3′: i) SEQ ID NO:858; ii) SEQ ID NO: 430; iii) a sequence that is complementary to SEQ ID NO: 430, where the sequence can comprise from 0 to 10 mismatches (non-complementary nucleotides) to SEQ ID NO: 430; and iv) SEQ ID NO:859.
55) In some cases, a cassette comprises, in order from 5′ to 3′: i) SEQ ID NO:854; ii) SEQ ID NO:431; iii) a sequence that is complementary to SEQ ID NO: 431, where the sequence can comprise from 0 to 10 mismatches (non-complementary nucleotides) to SEQ ID NO: 431; and iv) SEQ ID NO:855. In some cases, a cassette comprises, in order from 5′ to 3′: i) SEQ ID NO:856; ii) SEQ ID NO: 431; iii) a sequence that is complementary to SEQ ID NO: 431, where the sequence can comprise from 0 to 10 mismatches (non-complementary nucleotides) to SEQ ID NO: 431; and iv) SEQ ID NO:857. In some cases, a cassette comprises, in order from 5′ to 3′: i) SEQ ID NO:858; ii) SEQ ID NO: 431; iii) a sequence that is complementary to SEQ ID NO: 431, where the sequence can comprise from 0 to 10 mismatches (non-complementary nucleotides) to SEQ ID NO: 431; and iv) SEQ ID NO:859.
56) In some cases, a cassette comprises, in order from 5′ to 3′: i) SEQ ID NO:854; ii) SEQ ID NO:432; iii) a sequence that is complementary to SEQ ID NO: 432, where the sequence can comprise from 0 to 10 mismatches (non-complementary nucleotides) to SEQ ID NO: 432; and iv) SEQ ID NO:855. In some cases, a cassette comprises, in order from 5′ to 3′: i) SEQ ID NO:856; ii) SEQ ID NO: 432; iii) a sequence that is complementary to SEQ ID NO: 432, where the sequence can comprise from 0 to 10 mismatches (non-complementary nucleotides) to SEQ ID NO: 432; and iv) SEQ ID NO:857. In some cases, a cassette comprises, in order from 5′ to 3′: i) SEQ ID NO:858; ii) SEQ ID NO: 432; iii) a sequence that is complementary to SEQ ID NO: 432, where the sequence can comprise from 0 to 10 mismatches (non-complementary nucleotides) to SEQ ID NO: 432; and iv) SEQ ID NO:859.
57) In some cases, a cassette comprises, in order from 5′ to 3′: i) SEQ ID NO:854; ii) SEQ ID NO:433; iii) a sequence that is complementary to SEQ ID NO: 433, where the sequence can comprise from 0 to 10 mismatches (non-complementary nucleotides) to SEQ ID NO: 433; and iv) SEQ ID NO:855. In some cases, a cassette comprises, in order from 5′ to 3′: i) SEQ ID NO:856; ii) SEQ ID NO: 433; iii) a sequence that is complementary to SEQ ID NO: 433, where the sequence can comprise from 0 to 10 mismatches (non-complementary nucleotides) to SEQ ID NO: 433; and iv) SEQ ID NO:857. In some cases, a cassette comprises, in order from 5′ to 3′: i) SEQ ID NO:858; ii) SEQ ID NO: 433; iii) a sequence that is complementary to SEQ ID NO: 433, where the sequence can comprise from 0 to 10 mismatches (non-complementary nucleotides) to SEQ ID NO: 433; and iv) SEQ ID NO:859.
58) In some cases, a cassette comprises, in order from 5′ to 3′: i) SEQ ID NO:854; ii) SEQ ID NO:434; iii) a sequence that is complementary to SEQ ID NO: 434, where the sequence can comprise from 0 to 10 mismatches (non-complementary nucleotides) to SEQ ID NO: 434; and iv) SEQ ID NO:855. In some cases, a cassette comprises, in order from 5′ to 3′: i) SEQ ID NO:856; ii) SEQ ID NO: 434; iii) a sequence that is complementary to SEQ ID NO: 434, where the sequence can comprise from 0 to 10 mismatches (non-complementary nucleotides) to SEQ ID NO: 434; and iv) SEQ ID NO:857. In some cases, a cassette comprises, in order from 5′ to 3′: i) SEQ ID NO:858; ii) SEQ ID NO: 434; iii) a sequence that is complementary to SEQ ID NO: 434, where the sequence can comprise from 0 to 10 mismatches (non-complementary nucleotides) to SEQ ID NO: 434; and iv) SEQ ID NO:859.
59) In some cases, a cassette comprises, in order from 5′ to 3′: i) SEQ ID NO:854; ii) SEQ ID NO:435; iii) a sequence that is complementary to SEQ ID NO: 435, where the sequence can comprise from 0 to 10 mismatches (non-complementary nucleotides) to SEQ ID NO: 435; and iv) SEQ ID NO:855. In some cases, a cassette comprises, in order from 5′ to 3′: i) SEQ ID NO:856; ii) SEQ ID NO: 435; iii) a sequence that is complementary to SEQ ID NO: 435, where the sequence can comprise from 0 to 10 mismatches (non-complementary nucleotides) to SEQ ID NO: 435; and iv) SEQ ID NO:857. In some cases, a cassette comprises, in order from 5′ to 3′: i) SEQ ID NO:858; ii) SEQ ID NO: 435; iii) a sequence that is complementary to SEQ ID NO: 435, where the sequence can comprise from 0 to 10 mismatches (non-complementary nucleotides) to SEQ ID NO: 435; and iv) SEQ ID NO:859.
60) In some cases, a cassette comprises, in order from 5′ to 3′: i) SEQ ID NO:854; ii) SEQ ID NO:436; iii) a sequence that is complementary to SEQ ID NO: 436, where the sequence can comprise from 0 to 10 mismatches (non-complementary nucleotides) to SEQ ID NO: 436; and iv) SEQ ID NO:855. In some cases, a cassette comprises, in order from 5′ to 3′: i) SEQ ID NO:856; ii) SEQ ID NO: 436; iii) a sequence that is complementary to SEQ ID NO: 436, where the sequence can comprise from 0 to 10 mismatches (non-complementary nucleotides) to SEQ ID NO: 436; and iv) SEQ ID NO:857. In some cases, a cassette comprises, in order from 5′ to 3′: i) SEQ ID NO:858; ii) SEQ ID NO: 436; iii) a sequence that is complementary to SEQ ID NO: 436, where the sequence can comprise from 0 to 10 mismatches (non-complementary nucleotides) to SEQ ID NO: 436; and iv) SEQ ID NO:859.
61) In some cases, a cassette comprises, in order from 5′ to 3′: i) SEQ ID NO:854; ii) SEQ ID NO:437; iii) a sequence that is complementary to SEQ ID NO: 437, where the sequence can comprise from 0 to 10 mismatches (non-complementary nucleotides) to SEQ ID NO: 437; and iv) SEQ ID NO:855. In some cases, a cassette comprises, in order from 5′ to 3′: i) SEQ ID NO:856; ii) SEQ ID NO: 437; iii) a sequence that is complementary to SEQ ID NO: 437, where the sequence can comprise from 0 to 10 mismatches (non-complementary nucleotides) to SEQ ID NO: 437; and iv) SEQ ID NO:857. In some cases, a cassette comprises, in order from 5′ to 3′: i) SEQ ID NO:858; ii) SEQ ID NO: 437; iii) a sequence that is complementary to SEQ ID NO: 437, where the sequence can comprise from 0 to 10 mismatches (non-complementary nucleotides) to SEQ ID NO: 437; and iv) SEQ ID NO:859.
62) In some cases, a cassette comprises, in order from 5′ to 3′: i) SEQ ID NO:854; ii) SEQ ID NO:438; iii) a sequence that is complementary to SEQ ID NO: 438, where the sequence can comprise from 0 to 10 mismatches (non-complementary nucleotides) to SEQ ID NO: 438; and iv) SEQ ID NO:855. In some cases, a cassette comprises, in order from 5′ to 3′: i) SEQ ID NO:856; ii) SEQ ID NO: 438; iii) a sequence that is complementary to SEQ ID NO: 438, where the sequence can comprise from 0 to 10 mismatches (non-complementary nucleotides) to SEQ ID NO: 438; and iv) SEQ ID NO:857. In some cases, a cassette comprises, in order from 5′ to 3′: i) SEQ ID NO:858; ii) SEQ ID NO: 438; iii) a sequence that is complementary to SEQ ID NO: 438, where the sequence can comprise from 0 to 10 mismatches (non-complementary nucleotides) to SEQ ID NO: 438; and iv) SEQ ID NO:859.
63) In some cases, a cassette comprises, in order from 5′ to 3′: i) SEQ ID NO:854; ii) SEQ ID NO:439; iii) a sequence that is complementary to SEQ ID NO: 439, where the sequence can comprise from 0 to 10 mismatches (non-complementary nucleotides) to SEQ ID NO: 439; and iv) SEQ ID NO:855. In some cases, a cassette comprises, in order from 5′ to 3′: i) SEQ ID NO:856; ii) SEQ ID NO: 439; iii) a sequence that is complementary to SEQ ID NO: 439, where the sequence can comprise from 0 to 10 mismatches (non-complementary nucleotides) to SEQ ID NO: 439; and iv) SEQ ID NO:857. In some cases, a cassette comprises, in order from 5′ to 3′: i) SEQ ID NO:858; ii) SEQ ID NO: 439; iii) a sequence that is complementary to SEQ ID NO: 439, where the sequence can comprise from 0 to 10 mismatches (non-complementary nucleotides) to SEQ ID NO: 439; and iv) SEQ ID NO:859.
64) In some cases, a cassette comprises, in order from 5′ to 3′: i) SEQ ID NO:854; ii) SEQ ID NO:440; iii) a sequence that is complementary to SEQ ID NO: 440, where the sequence can comprise from 0 to 10 mismatches (non-complementary nucleotides) to SEQ ID NO: 440; and iv) SEQ ID NO:855. In some cases, a cassette comprises, in order from 5′ to 3′: i) SEQ ID NO:856; ii) SEQ ID NO: 440; iii) a sequence that is complementary to SEQ ID NO: 440, where the sequence can comprise from 0 to 10 mismatches (non-complementary nucleotides) to SEQ ID NO: 440; and iv) SEQ ID NO:857. In some cases, a cassette comprises, in order from 5′ to 3′: i) SEQ ID NO:858; ii) SEQ ID NO: 440; iii) a sequence that is complementary to SEQ ID NO: 440, where the sequence can comprise from 0 to 10 mismatches (non-complementary nucleotides) to SEQ ID NO: 440; and iv) SEQ ID NO:859.
65) In some cases, a cassette comprises, in order from 5′ to 3′: i) SEQ ID NO:854; ii) SEQ ID NO:441; iii) a sequence that is complementary to SEQ ID NO: 441, where the sequence can comprise from 0 to 10 mismatches (non-complementary nucleotides) to SEQ ID NO: 441; and iv) SEQ ID NO:855. In some cases, a cassette comprises, in order from 5′ to 3′: i) SEQ ID NO:856; ii) SEQ ID NO: 441; iii) a sequence that is complementary to SEQ ID NO: 441, where the sequence can comprise from 0 to 10 mismatches (non-complementary nucleotides) to SEQ ID NO: 441; and iv) SEQ ID NO:857. In some cases, a cassette comprises, in order from 5′ to 3′: i) SEQ ID NO:858; ii) SEQ ID NO: 441; iii) a sequence that is complementary to SEQ ID NO: 441, where the sequence can comprise from 0 to 10 mismatches (non-complementary nucleotides) to SEQ ID NO: 441; and iv) SEQ ID NO:859.
66) In some cases, a cassette comprises, in order from 5′ to 3′: i) SEQ ID NO:854; ii) SEQ ID NO:442; iii) a sequence that is complementary to SEQ ID NO: 442, where the sequence can comprise from 0 to 10 mismatches (non-complementary nucleotides) to SEQ ID NO: 442; and iv) SEQ ID NO:855. In some cases, a cassette comprises, in order from 5′ to 3′: i) SEQ ID NO:856; ii) SEQ ID NO: 442; iii) a sequence that is complementary to SEQ ID NO: 442, where the sequence can comprise from 0 to 10 mismatches (non-complementary nucleotides) to SEQ ID NO: 442; and iv) SEQ ID NO:857. In some cases, a cassette comprises, in order from 5′ to 3′: i) SEQ ID NO:858; ii) SEQ ID NO: 442; iii) a sequence that is complementary to SEQ ID NO: 442, where the sequence can comprise from 0 to 10 mismatches (non-complementary nucleotides) to SEQ ID NO: 442; and iv) SEQ ID NO:859.
67) In some cases, a cassette comprises, in order from 5′ to 3′: i) SEQ ID NO:854; ii) SEQ ID NO:443; iii) a sequence that is complementary to SEQ ID NO: 443, where the sequence can comprise from 0 to 10 mismatches (non-complementary nucleotides) to SEQ ID NO: 443; and iv) SEQ ID NO:855. In some cases, a cassette comprises, in order from 5′ to 3′: i) SEQ ID NO:856; ii) SEQ ID NO: 443; iii) a sequence that is complementary to SEQ ID NO: 443, where the sequence can comprise from 0 to 10 mismatches (non-complementary nucleotides) to SEQ ID NO: 443; and iv) SEQ ID NO:857. In some cases, a cassette comprises, in order from 5′ to 3′: i) SEQ ID NO:858; ii) SEQ ID NO: 443; iii) a sequence that is complementary to SEQ ID NO: 443, where the sequence can comprise from 0 to 10 mismatches (non-complementary nucleotides) to SEQ ID NO: 443; and iv) SEQ ID NO:859.
68) In some cases, a cassette comprises, in order from 5′ to 3′: i) SEQ ID NO:854; ii) SEQ ID NO:444; iii) a sequence that is complementary to SEQ ID NO: 444, where the sequence can comprise from 0 to 10 mismatches (non-complementary nucleotides) to SEQ ID NO: 444; and iv) SEQ ID NO:855. In some cases, a cassette comprises, in order from 5′ to 3′: i) SEQ ID NO:856; ii) SEQ ID NO: 444; iii) a sequence that is complementary to SEQ ID NO: 444, where the sequence can comprise from 0 to 10 mismatches (non-complementary nucleotides) to SEQ ID NO: 444; and iv) SEQ ID NO:857. In some cases, a cassette comprises, in order from 5′ to 3′: i) SEQ ID NO:858; ii) SEQ ID NO: 444; iii) a sequence that is complementary to SEQ ID NO: 444, where the sequence can comprise from 0 to 10 mismatches (non-complementary nucleotides) to SEQ ID NO: 444; and iv) SEQ ID NO:859.
69) In some cases, a cassette comprises, in order from 5′ to 3′: i) SEQ ID NO:854; ii) SEQ ID NO:445; iii) a sequence that is complementary to SEQ ID NO: 445, where the sequence can comprise from 0 to 10 mismatches (non-complementary nucleotides) to SEQ ID NO: 445; and iv) SEQ ID NO:855. In some cases, a cassette comprises, in order from 5′ to 3′: i) SEQ ID NO:856; ii) SEQ ID NO: 445; iii) a sequence that is complementary to SEQ ID NO: 445, where the sequence can comprise from 0 to 10 mismatches (non-complementary nucleotides) to SEQ ID NO: 445; and iv) SEQ ID NO:857. In some cases, a cassette comprises, in order from 5′ to 3′: i) SEQ ID NO:858; ii) SEQ ID NO: 445; iii) a sequence that is complementary to SEQ ID NO: 445, where the sequence can comprise from 0 to 10 mismatches (non-complementary nucleotides) to SEQ ID NO: 445; and iv) SEQ ID NO:859.
70) In some cases, a cassette comprises, in order from 5′ to 3′: i) SEQ ID NO:854; ii) SEQ ID NO:446; iii) a sequence that is complementary to SEQ ID NO: 446, where the sequence can comprise from 0 to 10 mismatches (non-complementary nucleotides) to SEQ ID NO: 446; and iv) SEQ ID NO:855. In some cases, a cassette comprises, in order from 5′ to 3′: i) SEQ ID NO:856; ii) SEQ ID NO: 446; iii) a sequence that is complementary to SEQ ID NO: 446, where the sequence can comprise from 0 to 10 mismatches (non-complementary nucleotides) to SEQ ID NO: 446; and iv) SEQ ID NO:857. In some cases, a cassette comprises, in order from 5′ to 3′: i) SEQ ID NO:858; ii) SEQ ID NO: 446; iii) a sequence that is complementary to SEQ ID NO: 446, where the sequence can comprise from 0 to 10 mismatches (non-complementary nucleotides) to SEQ ID NO: 446; and iv) SEQ ID NO:859.
71) In some cases, a cassette comprises, in order from 5′ to 3′: i) SEQ ID NO:854; ii) SEQ ID NO:447; iii) a sequence that is complementary to SEQ ID NO: 447, where the sequence can comprise from 0 to 10 mismatches (non-complementary nucleotides) to SEQ ID NO: 447; and iv) SEQ ID NO:855. In some cases, a cassette comprises, in order from 5′ to 3′: i) SEQ ID NO:856; ii) SEQ ID NO: 447; iii) a sequence that is complementary to SEQ ID NO: 447, where the sequence can comprise from 0 to 10 mismatches (non-complementary nucleotides) to SEQ ID NO: 447; and iv) SEQ ID NO:857. In some cases, a cassette comprises, in order from 5′ to 3′: i) SEQ ID NO:858; ii) SEQ ID NO: 447; iii) a sequence that is complementary to SEQ ID NO: 447, where the sequence can comprise from 0 to 10 mismatches (non-complementary nucleotides) to SEQ ID NO: 447; and iv) SEQ ID NO:859.
72) In some cases, a cassette comprises, in order from 5′ to 3′: i) SEQ ID NO:854; ii) SEQ ID NO:448; iii) a sequence that is complementary to SEQ ID NO: 448, where the sequence can comprise from 0 to 10 mismatches (non-complementary nucleotides) to SEQ ID NO: 448; and iv) SEQ ID NO:855. In some cases, a cassette comprises, in order from 5′ to 3′: i) SEQ ID NO:856; ii) SEQ ID NO: 448; iii) a sequence that is complementary to SEQ ID NO: 448, where the sequence can comprise from 0 to 10 mismatches (non-complementary nucleotides) to SEQ ID NO: 448; and iv) SEQ ID NO:857. In some cases, a cassette comprises, in order from 5′ to 3′: i) SEQ ID NO:858; ii) SEQ ID NO: 448; iii) a sequence that is complementary to SEQ ID NO: 448, where the sequence can comprise from 0 to 10 mismatches (non-complementary nucleotides) to SEQ ID NO: 448; and iv) SEQ ID NO:859.
73) In some cases, a cassette comprises, in order from 5′ to 3′: i) SEQ ID NO:854; ii) SEQ ID NO:449; iii) a sequence that is complementary to SEQ ID NO: 449, where the sequence can comprise from 0 to 10 mismatches (non-complementary nucleotides) to SEQ ID NO: 449; and iv) SEQ ID NO:855. In some cases, a cassette comprises, in order from 5′ to 3′: i) SEQ ID NO:856; ii) SEQ ID NO: 449; iii) a sequence that is complementary to SEQ ID NO: 449, where the sequence can comprise from 0 to 10 mismatches (non-complementary nucleotides) to SEQ ID NO: 449; and iv) SEQ ID NO:857. In some cases, a cassette comprises, in order from 5′ to 3′: i) SEQ ID NO:858; ii) SEQ ID NO: 449; iii) a sequence that is complementary to SEQ ID NO: 449, where the sequence can comprise from 0 to 10 mismatches (non-complementary nucleotides) to SEQ ID NO: 449; and iv) SEQ ID NO:859.
74) In some cases, a cassette comprises, in order from 5′ to 3′: i) SEQ ID NO:854; ii) SEQ ID NO:450; iii) a sequence that is complementary to SEQ ID NO: 450, where the sequence can comprise from 0 to 10 mismatches (non-complementary nucleotides) to SEQ ID NO: 450; and iv) SEQ ID NO:855. In some cases, a cassette comprises, in order from 5′ to 3′: i) SEQ ID NO:856; ii) SEQ ID NO: 450; iii) a sequence that is complementary to SEQ ID NO: 450, where the sequence can comprise from 0 to 10 mismatches (non-complementary nucleotides) to SEQ ID NO: 450; and iv) SEQ ID NO:857. In some cases, a cassette comprises, in order from 5′ to 3′: i) SEQ ID NO:858; ii) SEQ ID NO: 450; iii) a sequence that is complementary to SEQ ID NO: 450, where the sequence can comprise from 0 to 10 mismatches (non-complementary nucleotides) to SEQ ID NO: 450; and iv) SEQ ID NO:859.
75) In some cases, a cassette comprises, in order from 5′ to 3′: i) SEQ ID NO:854; ii) SEQ ID NO:451; iii) a sequence that is complementary to SEQ ID NO: 451, where the sequence can comprise from 0 to 10 mismatches (non-complementary nucleotides) to SEQ ID NO: 451; and iv) SEQ ID NO:855. In some cases, a cassette comprises, in order from 5′ to 3′: i) SEQ ID NO:856; ii) SEQ ID NO: 451; iii) a sequence that is complementary to SEQ ID NO: 451, where the sequence can comprise from 0 to 10 mismatches (non-complementary nucleotides) to SEQ ID NO: 451; and iv) SEQ ID NO:857. In some cases, a cassette comprises, in order from 5′ to 3′: i) SEQ ID NO:858; ii) SEQ ID NO: 451; iii) a sequence that is complementary to SEQ ID NO: 451, where the sequence can comprise from 0 to 10 mismatches (non-complementary nucleotides) to SEQ ID NO: 451; and iv) SEQ ID NO:859.
76) In some cases, a cassette comprises, in order from 5′ to 3′: i) SEQ ID NO:854; ii) SEQ ID NO:452; iii) a sequence that is complementary to SEQ ID NO: 452, where the sequence can comprise from 0 to 10 mismatches (non-complementary nucleotides) to SEQ ID NO: 452; and iv) SEQ ID NO:855. In some cases, a cassette comprises, in order from 5′ to 3′: i) SEQ ID NO:856; ii) SEQ ID NO: 452; iii) a sequence that is complementary to SEQ ID NO: 452, where the sequence can comprise from 0 to 10 mismatches (non-complementary nucleotides) to SEQ ID NO: 452; and iv) SEQ ID NO:857. In some cases, a cassette comprises, in order from 5′ to 3′: i) SEQ ID NO:858; ii) SEQ ID NO: 452; iii) a sequence that is complementary to SEQ ID NO: 452, where the sequence can comprise from 0 to 10 mismatches (non-complementary nucleotides) to SEQ ID NO: 452; and iv) SEQ ID NO:859.
77) In some cases, a cassette comprises, in order from 5′ to 3′: i) SEQ ID NO:854; ii) SEQ ID NO:453; iii) a sequence that is complementary to SEQ ID NO: 453, where the sequence can comprise from 0 to 10 mismatches (non-complementary nucleotides) to SEQ ID NO: 453; and iv) SEQ ID NO:855. In some cases, a cassette comprises, in order from 5′ to 3′: i) SEQ ID NO:856; ii) SEQ ID NO: 453; iii) a sequence that is complementary to SEQ ID NO: 453, where the sequence can comprise from 0 to 10 mismatches (non-complementary nucleotides) to SEQ ID NO: 453; and iv) SEQ ID NO:857. In some cases, a cassette comprises, in order from 5′ to 3′: i) SEQ ID NO:858; ii) SEQ ID NO: 453; iii) a sequence that is complementary to SEQ ID NO: 453, where the sequence can comprise from 0 to 10 mismatches (non-complementary nucleotides) to SEQ ID NO: 453; and iv) SEQ ID NO:859.
78) In some cases, a cassette comprises, in order from 5′ to 3′: i) SEQ ID NO:854; ii) SEQ ID NO:454; iii) a sequence that is complementary to SEQ ID NO: 454, where the sequence can comprise from 0 to 10 mismatches (non-complementary nucleotides) to SEQ ID NO: 454; and iv) SEQ ID NO:855. In some cases, a cassette comprises, in order from 5′ to 3′: i) SEQ ID NO:856; ii) SEQ ID NO: 454; iii) a sequence that is complementary to SEQ ID NO: 454, where the sequence can comprise from 0 to 10 mismatches (non-complementary nucleotides) to SEQ ID NO: 454; and iv) SEQ ID NO:857. In some cases, a cassette comprises, in order from 5′ to 3′: i) SEQ ID NO:858; ii) SEQ ID NO: 454; iii) a sequence that is complementary to SEQ ID NO: 454, where the sequence can comprise from 0 to 10 mismatches (non-complementary nucleotides) to SEQ ID NO: 454; and iv) SEQ ID NO:859.
79) In some cases, a cassette comprises, in order from 5′ to 3′: i) SEQ ID NO:854; ii) SEQ ID NO:455; iii) a sequence that is complementary to SEQ ID NO: 455, where the sequence can comprise from 0 to 10 mismatches (non-complementary nucleotides) to SEQ ID NO: 455; and iv) SEQ ID NO:855. In some cases, a cassette comprises, in order from 5′ to 3′: i) SEQ ID NO:856; ii) SEQ ID NO: 455; iii) a sequence that is complementary to SEQ ID NO: 455, where the sequence can comprise from 0 to 10 mismatches (non-complementary nucleotides) to SEQ ID NO: 455; and iv) SEQ ID NO:857. In some cases, a cassette comprises, in order from 5′ to 3′: i) SEQ ID NO:858; ii) SEQ ID NO: 455; iii) a sequence that is complementary to SEQ ID NO: 455, where the sequence can comprise from 0 to 10 mismatches (non-complementary nucleotides) to SEQ ID NO: 455; and iv) SEQ ID NO:859.
80) In some cases, a cassette comprises, in order from 5′ to 3′: i) SEQ ID NO:854; ii) SEQ ID NO:456; iii) a sequence that is complementary to SEQ ID NO: 456, where the sequence can comprise from 0 to 10 mismatches (non-complementary nucleotides) to SEQ ID NO: 456; and iv) SEQ ID NO:855. In some cases, a cassette comprises, in order from 5′ to 3′: i) SEQ ID NO:856; ii) SEQ ID NO: 456; iii) a sequence that is complementary to SEQ ID NO: 456, where the sequence can comprise from 0 to 10 mismatches (non-complementary nucleotides) to SEQ ID NO: 456; and iv) SEQ ID NO:857. In some cases, a cassette comprises, in order from 5′ to 3′: i) SEQ ID NO:858; ii) SEQ ID NO: 456; iii) a sequence that is complementary to SEQ ID NO: 456, where the sequence can comprise from 0 to 10 mismatches (non-complementary nucleotides) to SEQ ID NO: 456; and iv) SEQ ID NO:859.
Recombinant Expression Vector Encoding sbRNA

[0209] The present disclosure provides a recombinant expression vector comprising a nucleotide sequence encoding a recombinant RNA molecule of the present disclosure (where the recombinant RNA molecule may be referred to as an “artificial microRNA” or an “sbRNA”). In some cases, the nucleotide sequence encoding the recombinant RNA molecule is operably linked to a promoter that is functional in a eukaryotic cell. In some cases, the nucleotide sequence encoding the recombinant RNA molecule is operably linked to an RNA polymerase II promoter. In some cases, the nucleotide sequence encoding the recombinant RNA molecule is operably linked to an RNA polymerase III promoter. In some cases, the nucleotide sequence encoding the recombinant RNA molecule is operably linked to a CMV promoter. In some cases, the nucleotide sequence encoding the recombinant RNA molecule is operably linked to a CAG promoter. In some cases, the nucleotide sequence encoding the recombinant RNA molecule is operably linked to a CBA promoter. In some cases, the nucleotide sequence encoding the recombinant RNA molecule is operably linked to a U6 promoter. In some cases, the nucleotide sequence encoding the recombinant RNA molecule is operably linked to an EF1α promoter. In some cases, the nucleotide sequence encoding the recombinant RNA molecule is operably linked to an H1 promoter. In some cases, the recombinant expression vector comprises a 5′ adeno-associated virus (AAV) inverted terminal repeat (ITR) sequence and a 3′ AAV ITR sequence.

[0210] The present disclosure provides a recombinant expression vector comprising a nucleotide sequence encoding a recombinant RNA molecule of the present disclosure, where the recombinant RNA molecule comprises: a) a double-stranded RNA of the present disclosure; and b) a microRNA scaffold comprising a 5′ flanking polynucleotide (also referred to herein as a “5′ leader”), a loop polynucleotide, and a 3′ flanking polynucleotide (also referred to herein as a “3′ trailer”), wherein the recombinant nucleic acid comprises: i) the 5′ flanking polynucleotide; ii) the first strand of the double-stranded RNA; iii) the loop polynucleotide; (iv) the second strand of the double-stranded RNA; and iii) the 3′ trailer polynucleotide; and wherein at least one of the 5′ flanking polynucleotide, the loop polynucleotide, and the 3′ flanking polynucleotide is heterologous to the first and/or the second strand of the double-stranded RNA. The present disclosure provides a recombinant expression vector comprising a nucleotide sequence encoding a recombinant RNA molecule of the present disclosure, where the recombinant RNA molecule comprises: a) a double-stranded RNA of the present disclosure; and b) a microRNA scaffold comprising a 5′ flanking polynucleotide, a loop polynucleotide, and a 3′ flanking polynucleotide, wherein the recombinant nucleic acid comprises: i) the 5′ flanking polynucleotide; ii) the second strand of the double-stranded RNA; iii) the loop polynucleotide; (iv) the first strand of the double-stranded RNA; and iii) the 3′ flanking polynucleotide; and wherein at least one of the 5′ flanking polynucleotide, the loop polynucleotide, and the 3′ flanking polynucleotide is heterologous to the first and/or the second strand of the double-stranded RNA. In some cases, the 5′ flanking polynucleotide, the loop polynucleotide, and the 3′ flanking polynucleotide are derived from miR33.

[0211] The present disclosure provides a recombinant expression vector comprising a nucleotide sequence encoding a recombinant RNA molecule of the present disclosure, where the recombinant RNA molecule comprises: a) a double-stranded RNA of the present disclosure; and b) a microRNA scaffold comprising a 5′ flanking polynucleotide (also referred to herein as a “5′ leader”) and a 3′ flanking polynucleotide (also referred to herein as a “3′ trailer”), wherein the recombinant nucleic acid comprises: i) the 5′ flanking polynucleotide; ii) the first strand of the double-stranded RNA; iii) the second strand of the double-stranded RNA; and iv) the 3′ trailer polynucleotide; and wherein one or both of the 5′ flanking polynucleotide and the 3′ flanking polynucleotide is heterologous to the first and/or the second strand of the double-stranded RNA. The present disclosure provides a recombinant expression vector comprising a nucleotide sequence encoding a recombinant RNA molecule of the present disclosure, where the recombinant RNA molecule comprises: a) a double-stranded RNA of the present disclosure; and b) a microRNA scaffold comprising a 5′ flanking polynucleotide and a 3′ flanking polynucleotide, wherein the recombinant nucleic acid comprises: i) the 5′ flanking polynucleotide; ii) the second strand of the double-stranded RNA; iii) the first strand of the double-stranded RNA; and iv) the 3′ flanking polynucleotide; and wherein one or both of 5′ flanking polynucleotide and the 3′ flanking polynucleotide is heterologous to the first and/or the second strand of the double-stranded RNA. In some cases, the 5′ flanking polynucleotide and the 3′ flanking polynucleotide are derived from miR451.

### Recombinant Expression Vector Comprising a Cassette

[0212] The present disclosure provides a recombinant expression vector comprising cassette (a “DNA molecule”) of the present disclosure, where the cassette comprises a nucleotide sequence encoding a recombinant RNA molecule of the present disclosure (where the recombinant RNA molecule may be referred to as an “artificial microRNA” or an “sbRNA”). In some cases, the nucleotide sequence encoding the recombinant RNA molecule is operably linked to a promoter that is functional in a eukaryotic cell. In some cases, the nucleotide sequence encoding the recombinant RNA molecule is operably linked to an RNA polymerase II promoter. In some cases, the nucleotide sequence encoding the recombinant RNA molecule is operably linked to an RNA polymerase III promoter. In some cases, the nucleotide sequence encoding the recombinant RNA molecule is operably linked to a CMV promoter. In some cases, the nucleotide sequence encoding the recombinant RNA molecule is operably linked to a U6 promoter. In some cases, the nucleotide sequence encoding the recombinant RNA molecule is operably linked to an EF1α promoter. In some cases, the nucleotide sequence encoding the recombinant RNA molecule is operably linked to an H1 promoter. In some cases, the recombinant expression vector comprises a 5′ adeno-associated virus (AAV) inverted terminal repeat (ITR) sequence and a 3′ AAV ITR sequence.

[0213] The following are non-limiting examples of recombinant expression vectors comprising a cassette of the present disclosure.

1) In some cases, a recombinant expression vector comprises a cassette that comprises the nucleotide sequence: tgcacacctcctggcgggcagctctgCTGCTGCTAATGCTGCTGCTGtgttctggcaatacctgCAGCAGCAGCA AAAGCAGCAGCAgggaggcctgccctgactgcccacTTTTTG (SEQ ID NO:579; “CUG-10” in Table 7; FIG. 23). In some cases, the cassette does not include the 3′ TTTTTG sequence. In some cases, the cassette includes the nucleotide sequence Tₙ, where n is an integer from 5 to 10 (e.g., n is 5, 6, 7, 8, 9, or 10), in place of the 3′ TTTTTG sequence. In some cases, the cassette is operably linked to a promoter that is functional in a eukaryotic cell. In some cases, the cassette is operably linked to an RNA polymerase II promoter. In some cases, the cassette is operably linked to an RNA polymerase III promoter. In some cases, the cassette is operably linked to a CAG promoter. In some cases, the cassette is operably linked to a CBA promoter. In some cases, the cassette is operably linked to a CMV promoter. In some cases, the cassette is operably linked to a U6 promoter. In some cases, the cassette is operably linked to an EF1α promoter. In some cases, the cassette is operably linked to an H1 promoter. In some cases, the recombinant expression vector comprises a 5′ AAV ITR sequence and a 3′ AAV ITR sequence. In some cases, the AAV ITRs are AAV9 ITRs. In some cases, the AAV ITRs are AAV2 ITRs.
2) In some cases, a recombinant expression vector comprises a cassette that comprises the nucleotide sequence: tgcacacctcctggcgggcagctctgCTGCTGCTACAGCTGCTGCTGtgttctggcaatacctgCAGCAGCAGCA GAAGCAGCAGCAgggaggcctgccctgactgcccacTTTTTG (SEQ ID NO:580; “CUG_19” in Table 7; FIG. 23). In some cases, the cassette does not include the 3′ TTTTTG sequence. In some cases, the cassette includes the nucleotide sequence Tₙ, where n is an integer from 5 to 10 (e.g., n is 5, 6, 7, 8, 9, or 10), in place of the 3′ TTTTTG sequence. In some cases, the cassette is operably linked to a promoter that is functional in a eukaryotic cell. In some cases, the cassette is operably linked to an RNA polymerase II promoter. In some cases, the cassette is operably linked to an RNA polymerase III promoter. In some cases, the cassette is operably linked to a CAG promoter. In some cases, the cassette is operably linked to a CBA promoter. In some cases, the cassette is operably linked to a CMV promoter. In some cases, the cassette is operably linked to a U6 promoter. In some cases, the cassette is operably linked to an EF1α promoter. In some cases, the cassette is operably linked to an H1 promoter. In some cases, the recombinant expression vector comprises a 5′ AAV ITR sequence and a 3′ AAV ITR sequence. In some cases, the AAV ITRs are AAV9 ITRs. In some cases, the AAV ITRs are AAV2 ITRs.;
3) In some cases, a recombinant expression vector comprises a cassette that comprises the nucleotide sequence: tgcacacctcctggcgggcagctctgCTGCTGCTACTACTGCTGCTGtgttctggcaatacctgCAGCAGCAGAA GAAGCAGCAGCAgggaggcctgccctgactgcccacTTTTTG (SEQ ID NO:581; “CUG_28” in Table 7; FIG. 23). In some cases, the cassette does not include the 3′ TTTTTG sequence. In some cases, the cassette includes the nucleotide sequence Tₙ, where n is an integer from 5 to 10 (e.g., n is 5, 6, 7, 8, 9, or 10), in place of the 3′ TTTTTG sequence. In some cases, the cassette is operably linked to a promoter that is functional in a eukaryotic cell. In some cases, the cassette is operably linked to an RNA polymerase II promoter. In some cases, the cassette is operably linked to an RNA polymerase III promoter. In some cases, the cassette is operably linked to a CAG promoter. In some cases, the cassette is operably linked to a CBA promoter. In some cases, the cassette is operably linked to a CMV promoter. In some cases, the cassette is operably linked to a U6 promoter. In some cases, the cassette is operably linked to an EF1α promoter. In some cases, the cassette is operably linked to an H1 promoter. In some cases, the recombinant expression vector comprises a 5′ AAV ITR sequence and a 3′ AAV ITR sequence. In some cases, the AAV ITRs are AAV9 ITRs. In some cases, the AAV ITRs are AAV2 ITRs.
4) In some cases, a recombinant expression vector comprises a cassette that comprises the nucleotide sequence: tgcacacctcctggcgggcagctctgCTGCTGCTACTGATGCTGCTGtgttctggcaatacctgCAGCAGCAACA GAAGCAGCAGCAgggaggcctgccctgactgcccacTTTTTG (SEQ ID NO:582; “CUG_37” in Table 7; FIG. 23). In some cases, the cassette does not include the 3′ TTTTTG sequence. In some cases, the cassette includes the nucleotide sequence Tₙ, where n is an integer from 5 to 10 (e.g., n is 5, 6, 7, 8, 9, or 10), in place of the 3′ TTTTTG sequence. In some cases, the cassette is operably linked to a promoter that is functional in a eukaryotic cell. In some cases, the cassette is operably linked to an RNA polymerase II promoter. In some cases, the cassette is operably linked to an RNA polymerase III promoter. In some cases, the cassette is operably linked to a CAG promoter. In some cases, the cassette is operably linked to a CBA promoter. In some cases, the cassette is operably linked to a CMV promoter. In some cases, the cassette is operably linked to a U6 promoter. In some cases, the cassette is operably linked to an EF1α promoter. In some cases, the cassette is operably linked to an H1 promoter. In some cases, the recombinant expression vector comprises a 5′ AAV ITR sequence and a 3′ AAV ITR sequence. In some cases, the AAV ITRs are AAV9 ITRs. In some cases, the AAV ITRs are AAV2 ITRs.
5) In some cases, a recombinant expression vector comprises a cassette that comprises the nucleotide sequence: tgcacacctcctggcgggcagctctgCTGCTGCTACTGCAGCTGCTGtgttctggcaatacctgCAGCAGCAGCA GAAGCAGCAGCAgggaggcctgccctgactgcccacTTTTTG (SEQ ID NO:583; “CUG_46” in Table 7; FIG. 23). In some cases, the cassette does not include the 3′ TTTTTG sequence. In some cases, the cassette includes the nucleotide sequence Tₙ, where n is an integer from 5 to 10 (e.g., n is 5, 6, 7, 8, 9, or 10), in place of the 3′ TTTTTG sequence. In some cases, the cassette is operably linked to a promoter that is functional in a eukaryotic cell. In some cases, the cassette is operably linked to an RNA polymerase II promoter. In some cases, the cassette is operably linked to an RNA polymerase III promoter. In some cases, the cassette is operably linked to a CAG promoter. In some cases, the cassette is operably linked to a CBA promoter. In some cases, the cassette is operably linked to a CMV promoter. In some cases, the cassette is operably linked to a U6 promoter. In some cases, the cassette is operably linked to an EF1α promoter. In some cases, the cassette is operably linked to an H1 promoter. In some cases, the recombinant expression vector comprises a 5′ AAV ITR sequence and a 3′ AAV ITR sequence. In some cases, the AAV ITRs are AAV9 ITRs. In some cases, the AAV ITRs are AAV2 ITRs.
6) In some cases, a recombinant expression vector comprises a cassette that comprises the nucleotide sequence: tgcacacctcctggcgggcagctctgCTGCTGCTACTGCTACTGCTGtgttctggcaatacctgCAGCAGAAGCA GAAGCAGCAGCAgggaggcctgccctgactgcccacTTTTTG (SEQ ID NO:584; CUG_55” in Table 7; FIG. 23). In some cases, the cassette does not include the 3′ TTTTTG sequence. In some cases, the cassette includes the nucleotide sequence Tₙ, where n is an integer from 5 to 10 (e.g., n is 5, 6, 7, 8, 9, or 10), in place of the 3′ TTTTTG sequence. In some cases, the cassette is operably linked to a promoter that is functional in a eukaryotic cell. In some cases, the cassette is operably linked to an RNA polymerase II promoter. In some cases, the cassette is operably linked to an RNA polymerase III promoter. In some cases, the cassette is operably linked to a CAG promoter. In some cases, the cassette is operably linked to a CBA promoter. In some cases, the cassette is operably linked to a CMV promoter. In some cases, the cassette is operably linked to a U6 promoter. In some cases, the cassette is operably linked to an EF1α promoter. In some cases, the cassette is operably linked to an H1 promoter. In some cases, the recombinant expression vector comprises a 5′ AAV ITR sequence and a 3′ AAV ITR sequence. In some cases, the AAV ITRs are AAV9 ITRs. In some cases, the AAV ITRs are AAV2 ITRs.
7) In some cases, a recombinant expression vector comprises a cassette that comprises the nucleotide sequence: tgcacacctcctggcgggcagctctgCTGCTGCTACTGCTGATGCTGtgttctggcaatacctgCAGCAACAGCA GAAGCAGCAGCAgggaggcctgccctgactgcccacTTTTTG (SEQ ID NO:585; “CUG_64” in Table 7; FIG. 23). In some cases, the cassette does not include the 3′ TTTTTG sequence. In some cases, the cassette includes the nucleotide sequence Tₙ, where n is an integer from 5 to 10 (e.g., n is 5, 6, 7, 8, 9, or 10), in place of the 3′ TTTTTG sequence. In some cases, the cassette is operably linked to a promoter that is functional in a eukaryotic cell. In some cases, the cassette is operably linked to an RNA polymerase II promoter. In some cases, the cassette is operably linked to an RNA polymerase III promoter. In some cases, the cassette is operably linked to a CAG promoter. In some cases, the cassette is operably linked to a CBA promoter. In some cases, the cassette is operably linked to a CMV promoter. In some cases, the cassette is operably linked to a U6 promoter. In some cases, the cassette is operably linked to an EF1α promoter. In some cases, the cassette is operably linked to an H1 promoter. In some cases, the recombinant expression vector comprises a 5′ AAV ITR sequence and a 3′ AAV ITR sequence. In some cases, the AAV ITRs are AAV9 ITRs. In some cases, the AAV ITRs are AAV2 ITRs.
8) In some cases, a recombinant expression vector comprises a cassette that comprises the nucleotide sequence: tgcacacctcctggcgggcagctctgCTGCTGCTGAAGCTGCTGCTGtgttctggcaatacctgCAGCAGCAGCA ACAGCAGCAGCAgggaggcctgccctgactgcccacTTTTTG (SEQ ID NO:586; “CUG_118” in Table 7; FIG. 23). In some cases, the cassette does not include the 3′ TTTTTG sequence. In some cases, the cassette includes the nucleotide sequence Tₙ, where n is an integer from 5 to 10 (e.g., n is 5, 6, 7, 8, 9, or 10), in place of the 3′ TTTTTG sequence. In some cases, the cassette is operably linked to a promoter that is functional in a eukaryotic cell. In some cases, the cassette is operably linked to an RNA polymerase II promoter. In some cases, the cassette is operably linked to an RNA polymerase III promoter. In some cases, the cassette is operably linked to a CAG promoter. In some cases, the cassette is operably linked to a CBA promoter. In some cases, the cassette is operably linked to a CMV promoter. In some cases, the cassette is operably linked to a U6 promoter. In some cases, the cassette is operably linked to an EF1α promoter. In some cases, the cassette is operably linked to an H1 promoter. In some cases, the recombinant expression vector comprises a 5′ AAV ITR sequence and a 3′ AAV ITR sequence. In some cases, the AAV ITRs are AAV9 ITRs. In some cases, the AAV ITRs are AAV2 ITRs.
9) In some cases, a recombinant expression vector comprises a cassette that comprises the nucleotide sequence: tgcacacctcctggcgggcagctctgCTGCTGCTGATACTGCTGCTGtgttctggcaatacctgCAGCAGCAGAA ACAGCAGCAGCAgggaggcctgccctgactgcccacTTTTTG (SEQ ID NO:587; “CUG_127” in Table 7; FIG. 23). In some cases, the cassette does not include the 3′ TTTTTG sequence. In some cases, the cassette includes the nucleotide sequence Tₙ, where n is an integer from 5 to 10 (e.g., n is 5, 6, 7, 8, 9, or 10), in place of the 3′ TTTTTG sequence. In some cases, the cassette is operably linked to a promoter that is functional in a eukaryotic cell. In some cases, the cassette is operably linked to an RNA polymerase II promoter. In some cases, the cassette is operably linked to an RNA polymerase III promoter. In some cases, the cassette is operably linked to a CAG promoter. In some cases, the cassette is operably linked to a CBA promoter. In some cases, the cassette is operably linked to a CMV promoter. In some cases, the cassette is operably linked to a U6 promoter. In some cases, the cassette is operably linked to an EF1α promoter. In some cases, the cassette is operably linked to an H1 promoter. In some cases, the recombinant expression vector comprises a 5′ AAV ITR sequence and a 3′ AAV ITR sequence. In some cases, the AAV ITRs are AAV9 ITRs. In some cases, the AAV ITRs are AAV2 ITRs.
10) In some cases, a recombinant expression vector comprises a cassette that comprises the nucleotide sequence: tgcacacctcctggcgggcagctctgCTGCTGCTGATGATGCTGCTGtgttctggcaatacctgCAGCAGCAACA ACAGCAGCAGCAgggaggcctgccctgactgcccacTTTTTG (SEQ ID NO:588; “CUG_136” in Table 7; FIG. 23). In some cases, the cassette does not include the 3′ TTTTTG sequence. In some cases, the cassette includes the nucleotide sequence Tₙ, where n is an integer from 5 to 10 (e.g., n is 5, 6, 7, 8, 9, or 10), in place of the 3′ TTTTTG sequence. In some cases, the cassette is operably linked to a promoter that is functional in a eukaryotic cell. In some cases, the cassette is operably linked to an RNA polymerase II promoter. In some cases, the cassette is operably linked to an RNA polymerase III promoter. In some cases, the cassette is operably linked to a CAG promoter. In some cases, the cassette is operably linked to a CBA promoter. In some cases, the cassette is operably linked to a CMV promoter. In some cases, the cassette is operably linked to a U6 promoter. In some cases, the cassette is operably linked to an EF1α promoter. In some cases, the cassette is operably linked to an H1 promoter. In some cases, the recombinant expression vector comprises a 5′ AAV ITR sequence and a 3′ AAV ITR sequence. In some cases, the AAV ITRs are AAV9 ITRs. In some cases, the AAV ITRs are AAV2 ITRs.
11) In some cases, a recombinant expression vector comprises a cassette that comprises the nucleotide sequence: tgcacacctcctggcgggcagctctgCTGCTGCTGATGCAGCTGCTGtgttctggcaatacctgCAGCAGCAGCA ACAGCAGCAGCAgggaggcctgccctgactgcccacTTTTTG (SEQ ID NO:589; “CUG_145” in Table 7; FIG. 23). In some cases, the cassette does not include the 3′ TTTTTG sequence. In some cases, the cassette includes the nucleotide sequence Tₙ, where n is an integer from 5 to 10 (e.g., n is 5, 6, 7, 8, 9, or 10), in place of the 3′ TTTTTG sequence. In some cases, the cassette is operably linked to a promoter that is functional in a eukaryotic cell. In some cases, the cassette is operably linked to an RNA polymerase II promoter. In some cases, the cassette is operably linked to an RNA polymerase III promoter. In some cases, the cassette is operably linked to a CAG promoter. In some cases, the cassette is operably linked to a CBA promoter. In some cases, the cassette is operably linked to a CMV promoter. In some cases, the cassette is operably linked to a U6 promoter. In some cases, the cassette is operably linked to an EF1α promoter. In some cases, the cassette is operably linked to an H1 promoter. In some cases, the recombinant expression vector comprises a 5′ AAV ITR sequence and a 3′ AAV ITR sequence. In some cases, the AAV ITRs are AAV9 ITRs. In some cases, the AAV ITRs are AAV2 ITRs.
12) In some cases, a recombinant expression vector comprises a cassette that comprises the nucleotide sequence: tgcacacctcctggcgggcagctctgCTGCTGCTGATGCTACTGCTGtgttctggcaatacctgCAGCAGAAGCA ACAGCAGCAGCAgggaggcctgccctgactgcccacTTTTTG (SEQ ID NO:590; “CUG_154” in Table 7; FIG. 23). In some cases, the cassette does not include the 3′ TTTTTG sequence. In some cases, the cassette includes the nucleotide sequence Tₙ, where n is an integer from 5 to 10 (e.g., n is 5, 6, 7, 8, 9, or 10), in place of the 3′ TTTTTG sequence. In some cases, the cassette is operably linked to a promoter that is functional in a eukaryotic cell. In some cases, the cassette is operably linked to an RNA polymerase II promoter. In some cases, the cassette is operably linked to an RNA polymerase III promoter. In some cases, the cassette is operably linked to a CAG promoter. In some cases, the cassette is operably linked to a CBA promoter. In some cases, the cassette is operably linked to a CMV promoter. In some cases, the cassette is operably linked to a U6 promoter. In some cases, the cassette is operably linked to an EF1α promoter. In some cases, the cassette is operably linked to an H1 promoter. In some cases, the recombinant expression vector comprises a 5′ AAV ITR sequence and a 3′ AAV ITR sequence. In some cases, the AAV ITRs are AAV9 ITRs. In some cases, the AAV ITRs are AAV2 ITRs.
13) In some cases, a recombinant expression vector comprises a cassette that comprises the nucleotide sequence: tgcacacctcctggcgggcagctctgCTGCTGCTGATGCTGATGCTGtgttctggcaatacctgCAGCAACAGCA ACAGCAGCAGCAgggaggcctgccctgactgcccacTTTTTG (SEQ ID NO:591; “CUG_163” in Table 7; FIG. 23). In some cases, the cassette does not include the 3′ TTTTTG sequence. In some cases, the cassette includes the nucleotide sequence Tₙ, where n is an integer from 5 to 10 (e.g., n is 5, 6, 7, 8, 9, or 10), in place of the 3′ TTTTTG sequence. In some cases, the cassette is operably linked to a promoter that is functional in a eukaryotic cell. In some cases, the cassette is operably linked to an RNA polymerase II promoter. In some cases, the cassette is operably linked to an RNA polymerase III promoter. In some cases, the cassette is operably linked to a CAG promoter. In some cases, the cassette is operably linked to a CBA promoter. In some cases, the cassette is operably linked to a CMV promoter. In some cases, the cassette is operably linked to a U6 promoter. In some cases, the cassette is operably linked to an EF1α promoter. In some cases, the cassette is operably linked to an H1 promoter. In some cases, the recombinant expression vector comprises a 5′ AAV ITR sequence and a 3′ AAV ITR sequence. In some cases, the AAV ITRs are AAV9 ITRs. In some cases, the AAV ITRs are AAV2 ITRs.
14) In some cases, a recombinant expression vector comprises a cassette that comprises the nucleotide sequence: tgcacacctcctggcgggcagctctgCTGCTGCTGCAACTGCTGCTGtgttctggcaatacctgCAGCAGCAGAA GCAGCAGCAGCAgggaggcctgccctgactgcccacTTTTTG (SEQ ID NO:592; “CUG_217” in Table 7; FIG. 23). In some cases, the cassette does not include the 3′ TTTTTG sequence. In some cases, the cassette includes the nucleotide sequence Tₙ, where n is an integer from 5 to 10 (e.g., n is 5, 6, 7, 8, 9, or 10), in place of the 3′ TTTTTG sequence. In some cases, the cassette is operably linked to a promoter that is functional in a eukaryotic cell. In some cases, the cassette is operably linked to an RNA polymerase II promoter. In some cases, the cassette is operably linked to an RNA polymerase III promoter. In some cases, the cassette is operably linked to a CAG promoter. In some cases, the cassette is operably linked to a CBA promoter. In some cases, the cassette is operably linked to a CMV promoter. In some cases, the cassette is operably linked to a U6 promoter. In some cases, the cassette is operably linked to an EF1α promoter. In some cases, the cassette is operably linked to an H1 promoter. In some cases, the recombinant expression vector comprises a 5′ AAV ITR sequence and a 3′ AAV ITR sequence. In some cases, the AAV ITRs are AAV9 ITRs. In some cases, the AAV ITRs are AAV2 ITRs.
15) In some cases, a recombinant expression vector comprises a cassette that comprises the nucleotide sequence: tgcacacctcctggcgggcagctctgCTGCTGCTGCAGATGCTGCTGtgttctggcaatacctgCAGCAGCAACA GCAGCAGCAGCAgggaggcctgccctgactgcccacTTTTTG (SEQ ID NO:593; “CUG_226” in Table 7; FIG. 23). In some cases, the cassette does not include the 3′ TTTTTG sequence. In some cases, the cassette includes the nucleotide sequence Tₙ, where n is an integer from 5 to 10 (e.g., n is 5, 6, 7, 8, 9, or 10), in place of the 3′ TTTTTG sequence. In some cases, the cassette is operably linked to a promoter that is functional in a eukaryotic cell. In some cases, the cassette is operably linked to an RNA polymerase II promoter. In some cases, the cassette is operably linked to an RNA polymerase III promoter. In some cases, the cassette is operably linked to a CAG promoter. In some cases, the cassette is operably linked to a CBA promoter. In some cases, the cassette is operably linked to a CMV promoter. In some cases, the cassette is operably linked to a U6 promoter. In some cases, the cassette is operably linked to an EF1α promoter. In some cases, the cassette is operably linked to an H1 promoter. In some cases, the recombinant expression vector comprises a 5′ AAV ITR sequence and a 3′ AAV ITR sequence. In some cases, the AAV ITRs are AAV9 ITRs. In some cases, the AAV ITRs are AAV2 ITRs.
16) In some cases, a recombinant expression vector comprises a cassette that comprises the nucleotide sequence: tgcacacctcctggcgggcagctctgCTGCTGCTGCAGCAGCTGCTGtgttctggcaatacctgCAGCAGCAGCA GCAGCAGCAGCAgggaggcctgccctgactgcccacTTTTTG (SEQ ID NO:594; “CUG_235” in Table 7; FIG. 23). In some cases, the cassette does not include the 3′ TTTTTG sequence. In some cases, the cassette includes the nucleotide sequence Tₙ, where n is an integer from 5 to 10 (e.g., n is 5, 6, 7, 8, 9, or 10), in place of the 3′ TTTTTG sequence. In some cases, the cassette is operably linked to a promoter that is functional in a eukaryotic cell. In some cases, the cassette is operably linked to an RNA polymerase II promoter. In some cases, the cassette is operably linked to an RNA polymerase III promoter. In some cases, the cassette is operably linked to a CAG promoter. In some cases, the cassette is operably linked to a CBA promoter. In some cases, the cassette is operably linked to a CMV promoter. In some cases, the cassette is operably linked to a U6 promoter. In some cases, the cassette is operably linked to an EF1α promoter. In some cases, the cassette is operably linked to an H1 promoter. In some cases, the recombinant expression vector comprises a 5′ AAV ITR sequence and a 3′ AAV ITR sequence. In some cases, the AAV ITRs are AAV9 ITRs. In some cases, the AAV ITRs are AAV2 ITRs.
17) In some cases, a recombinant expression vector comprises a cassette that comprises the nucleotide sequence: tgcacacctcctggcgggcagctctgCTGCTGCTGCAGCTACTGCTGtgttctggcaatacctgCAGCAGAAGCA GCAGCAGCAGCAgggaggcctgccctgactgcccacTTTTTG (SEQ ID NO:595; “CUG_244” in Table 7; FIG. 23). In some cases, the cassette does not include the 3′ TTTTTG sequence. In some cases, the cassette includes the nucleotide sequence Tₙ, where n is an integer from 5 to 10 (e.g., n is 5, 6, 7, 8, 9, or 10), in place of the 3′ TTTTTG sequence. In some cases, the cassette is operably linked to a promoter that is functional in a eukaryotic cell. In some cases, the cassette is operably linked to an RNA polymerase II promoter. In some cases, the cassette is operably linked to an RNA polymerase III promoter. In some cases, the cassette is operably linked to a CAG promoter. In some cases, the cassette is operably linked to a CBA promoter. In some cases, the cassette is operably linked to a CMV promoter. In some cases, the cassette is operably linked to a U6 promoter. In some cases, the cassette is operably linked to an EF1α promoter. In some cases, the cassette is operably linked to an H1 promoter. In some cases, the recombinant expression vector comprises a 5′ AAV ITR sequence and a 3′ AAV ITR sequence. In some cases, the AAV ITRs are AAV9 ITRs. In some cases, the AAV ITRs are AAV2 ITRs.
18) In some cases, a recombinant expression vector comprises a cassette that comprises the nucleotide sequence: tgcacacctcctggcgggcagctctgCTGCTGCTGCAGCTGATGCTGtgttctggcaatacctgCAGCAACAGCA GCAGCAGCAGCAgggaggcctgccctgactgcccacTTTTTG (SEQ ID NO:596; “CUG_253” in Table 7; FIG. 23). In some cases, the cassette does not include the 3′ TTTTTG sequence. In some cases, the cassette includes the nucleotide sequence Tₙ, where n is an integer from 5 to 10 (e.g., n is 5, 6, 7, 8, 9, or 10), in place of the 3′ TTTTTG sequence. In some cases, the cassette is operably linked to a promoter that is functional in a eukaryotic cell. In some cases, the cassette is operably linked to an RNA polymerase II promoter. In some cases, the cassette is operably linked to an RNA polymerase III promoter. In some cases, the cassette is operably linked to a CAG promoter. In some cases, the cassette is operably linked to a CBA promoter. In some cases, the cassette is operably linked to a CMV promoter. In some cases, the cassette is operably linked to a U6 promoter. In some cases, the cassette is operably linked to an EF1α promoter. In some cases, the cassette is operably linked to an H1 promoter. In some cases, the recombinant expression vector comprises a 5′ AAV ITR sequence and a 3′ AAV ITR sequence. In some cases, the AAV ITRs are AAV9 ITRs. In some cases, the AAV ITRs are AAV2 ITRs.
19) In some cases, a recombinant expression vector comprises a cassette that comprises the nucleotide sequence: tgcacacctcctggcgggcagctctgCTGCTGCAGCTGCTGCTGCTGtgttctggcaatacctgCAGCAGCAGCA GCAGCAGCAGCAgggaggcctgccctgactgcccacTTTTTG (SEQ ID NO:597; “CUG_NA-A” in Table 7; FIG. 23). In some cases, the cassette does not include the 3′ TTTTTG sequence. In some cases, the cassette includes the nucleotide sequence Tₙ, where n is an integer from 5 to 10 (e.g., n is 5, 6, 7, 8, 9, or 10), in place of the 3′ TTTTTG sequence. In some cases, the cassette is operably linked to a promoter that is functional in a eukaryotic cell. In some cases, the cassette is operably linked to an RNA polymerase II promoter. In some cases, the cassette is operably linked to an RNA polymerase III promoter. In some cases, the cassette is operably linked to a CAG promoter. In some cases, the cassette is operably linked to a CBA promoter. In some cases, the cassette is operably linked to a CMV promoter. In some cases, the cassette is operably linked to a U6 promoter. In some cases, the cassette is operably linked to an EF1α promoter. In some cases, the cassette is operably linked to an H1 promoter. In some cases, the recombinant expression vector comprises a 5′ AAV ITR sequence and a 3′ AAV ITR sequence. In some cases, the AAV ITRs are AAV9 ITRs. In some cases, the AAV ITRs are AAV2 ITRs.
20) In some cases, a recombinant expression vector comprises a cassette that comprises the nucleotide sequence: tgcacacctcctggcgggcagctctgCTGCTGCAACTGCTGCTGCTGtgttctggcaatacctgCAGCAGCAGCA GAAGCAGCAGCAgggaggcctgccctgactgcccacTTTTTG (SEQ ID NO:598; “CUG_NA_B” in Table 7; FIG. 23). In some cases, the cassette does not include the 3′ TTTTTG sequence. In some cases, the cassette includes the nucleotide sequence Tₙ, where n is an integer from 5 to 10 (e.g., n is 5, 6, 7, 8, 9, or 10), in place of the 3′ TTTTTG sequence. In some cases, the cassette is operably linked to a promoter that is functional in a eukaryotic cell. In some cases, the cassette is operably linked to an RNA polymerase II promoter. In some cases, the cassette is operably linked to an RNA polymerase III promoter. In some cases, the cassette is operably linked to a CAG promoter. In some cases, the cassette is operably linked to a CBA promoter. In some cases, the cassette is operably linked to a CMV promoter. In some cases, the cassette is operably linked to a U6 promoter. In some cases, the cassette is operably linked to an EF1α promoter. In some cases, the cassette is operably linked to an H1 promoter. In some cases, the recombinant expression vector comprises a 5′ AAV ITR sequence and a 3′ AAV ITR sequence. In some cases, the AAV ITRs are AAV9 ITRs. In some cases, the AAV ITRs are AAV2 ITRs.
21) In some cases, a recombinant expression vector comprises a cassette that comprises the nucleotide sequence: tgcacacctcctggcgggcagctctgCTGCTGCAGATGCTGCTGCTGtgttctggcaatacctgCAGCAGCAGCA ACAGCAGCAGCAgggaggcctgccctgactgcccacTTTTTG (SEQ ID NO:599; “CUG_NA_C” in Table 7; FIG. 23). In some cases, the cassette does not include the 3′ TTTTTG sequence. In some cases, the cassette does not include the 3′ TTTTTG sequence. In some cases, the cassette includes the nucleotide sequence Tₙ, where n is an integer from 5 to 10 (e.g., n is 5, 6, 7, 8, 9, or 10), in place of the 3′ TTTTTG sequence. In some cases, the cassette is operably linked to a promoter that is functional in a eukaryotic cell. In some cases, the cassette is operably linked to an RNA polymerase II promoter. In some cases, the cassette is operably linked to an RNA polymerase III promoter. In some cases, the cassette is operably linked to a CAG promoter. In some cases, the cassette is operably linked to a CBA promoter. In some cases, the cassette is operably linked to a CMV promoter. In some cases, the cassette is operably linked to a U6 promoter. In some cases, the cassette is operably linked to an EF1α promoter. In some cases, the cassette is operably linked to an H1 promoter. In some cases, the recombinant expression vector comprises a 5′ AAV ITR sequence and a 3′ AAV ITR sequence. In some cases, the AAV ITRs are AAV9 ITRs. In some cases, the AAV ITRs are AAV2 ITRs.
22) In some cases, a recombinant expression vector comprises a cassette that comprises the nucleotide sequence: tgcacacctcctggcgggcagctctgCTGCTGCAGCAGCTGCTGCTGtgttctggcaatacctgCAGCAGCAGCA GCAGCAGCAGCAgggaggcctgccctgactgcccacTTTTTG (SEQ ID NO:600; “CUG_NA_D” in Table 7; FIG. 23). In some cases, the cassette does not include the 3′ TTTTTG sequence. In some cases, the cassette includes the nucleotide sequence Tₙ, where n is an integer from 5 to 10 (e.g., n is 5, 6, 7, 8, 9, or 10), in place of the 3′ TTTTTG sequence. In some cases, the cassette is operably linked to a promoter that is functional in a eukaryotic cell. In some cases, the cassette is operably linked to an RNA polymerase II promoter. In some cases, the cassette is operably linked to an RNA polymerase III promoter. In some cases, the cassette is operably linked to a CAG promoter. In some cases, the cassette is operably linked to a CBA promoter. In some cases, the cassette is operably linked to a CMV promoter. In some cases, the cassette is operably linked to a U6 promoter. In some cases, the cassette is operably linked to an EF1α promoter. In some cases, the cassette is operably linked to an H1 promoter. In some cases, the recombinant expression vector comprises a 5′ AAV ITR sequence and a 3′ AAV ITR sequence. In some cases, the AAV ITRs are AAV9 ITRs. In some cases, the AAV ITRs are AAV2 ITRs.
23) In some cases, a recombinant expression vector comprises a cassette that comprises the nucleotide sequence: tgcacacctcctggcgggcagctctgCTGCTGCAGCTACTGCTGCTGtgttctggcaatacctgCAGCAGCAGAA GCAGCAGCAGCAgggaggcctgccctgactgcccacTTTTTG (SEQ ID NO:601; “CUG_NA_E” in Table 7; FIG. 23). In some cases, the cassette does not include the 3′ TTTTTG sequence. In some cases, the cassette includes the nucleotide sequence Tₙ, where n is an integer from 5 to 10 (e.g., n is 5, 6, 7, 8, 9, or 10), in place of the 3′ TTTTTG sequence. In some cases, the cassette is operably linked to a promoter that is functional in a eukaryotic cell. In some cases, the cassette is operably linked to an RNA polymerase II promoter. In some cases, the cassette is operably linked to an RNA polymerase III promoter. In some cases, the cassette is operably linked to a CAG promoter. In some cases, the cassette is operably linked to a CBA promoter. In some cases, the cassette is operably linked to a CMV promoter. In some cases, the cassette is operably linked to a U6 promoter. In some cases, the cassette is operably linked to an EF1α promoter. In some cases, the cassette is operably linked to an H1 promoter. In some cases, the recombinant expression vector comprises a 5′ AAV ITR sequence and a 3′ AAV ITR sequence. In some cases, the AAV ITRs are AAV9 ITRs. In some cases, the AAV ITRs are AAV2 ITRs.
24) In some cases, a recombinant expression vector comprises a cassette that comprises the nucleotide sequence: tgcacacctcctggcgggcagctctgCTGCTGCAGCTGATGCTGCTGtgttctggcaatacctgCAGCAGCAACA GCAGCAGCAGCAgggaggcctgccctgactgcccacTTTTTG (SEQ ID NO:602; “CUG_NA_F” in Table 7; FIG. 23). In some cases, the cassette does not include the 3′ TTTTTG sequence. In some cases, the cassette includes the nucleotide sequence Tₙ, where n is an integer from 5 to 10 (e.g., n is 5, 6, 7, 8, 9, or 10), in place of the 3′ TTTTTG sequence. In some cases, the cassette is operably linked to a promoter that is functional in a eukaryotic cell. In some cases, the cassette is operably linked to an RNA polymerase II promoter. In some cases, the cassette is operably linked to an RNA polymerase III promoter. In some cases, the cassette is operably linked to a CAG promoter. In some cases, the cassette is operably linked to a CBA promoter. In some cases, the cassette is operably linked to a CMV promoter. In some cases, the cassette is operably linked to a U6 promoter. In some cases, the cassette is operably linked to an EF1α promoter. In some cases, the cassette is operably linked to an H1 promoter. In some cases, the recombinant expression vector comprises a 5′ AAV ITR sequence and a 3′ AAV ITR sequence. In some cases, the AAV ITRs are AAV9 ITRs. In some cases, the AAV ITRs are AAV2 ITRs.
25) In some cases, a recombinant expression vector comprises a cassette that comprises the nucleotide sequence: tgcacacctcctggcgggcagctctgCTGCTGCAGCTGCAGCTGCTGtgttctggcaatacctgCAGCAGCAGCA GCAGCAGCAGCAgggaggcctgccctgactgcccacTTTTTG (SEQ ID NO:603; “CUG_NA_G” in Table 7; FIG. 23). In some cases, the cassette does not include the 3′ TTTTTG sequence. In some cases, the cassette includes the nucleotide sequence Tₙ, where n is an integer from 5 to 10 (e.g., n is 5, 6, 7, 8, 9, or 10), in place of the 3′ TTTTTG sequence. In some cases, the cassette is operably linked to a promoter that is functional in a eukaryotic cell. In some cases, the cassette is operably linked to an RNA polymerase II promoter. In some cases, the cassette is operably linked to an RNA polymerase III promoter. In some cases, the cassette is operably linked to a CAG promoter. In some cases, the cassette is operably linked to a CBA promoter. In some cases, the cassette is operably linked to a CMV promoter. In some cases, the cassette is operably linked to a U6 promoter. In some cases, the cassette is operably linked to an EF1α promoter. In some cases, the cassette is operably linked to an H1 promoter. In some cases, the recombinant expression vector comprises a 5′ AAV ITR sequence and a 3′ AAV ITR sequence. In some cases, the AAV ITRs are AAV9 ITRs. In some cases, the AAV ITRs are AAV2 ITRs.
26) In some cases, a recombinant expression vector comprises a cassette that comprises the nucleotide sequence: tgcacacctcctggcgggcagctctgCTGCTGCAGCTGCTACTGCTGtgttctggcaatacctgCAGCAGAAGCA GCAGCAGCAGCAgggaggcctgccctgactgcccacTTTTTG (SEQ ID NO:604; “CUG_NA_H” in Table 7; FIG. 23). In some cases, the cassette does not include the 3′ TTTTTG sequence. In some cases, the cassette includes the nucleotide sequence Tₙ, where n is an integer from 5 to 10 (e.g., n is 5, 6, 7, 8, 9, or 10), in place of the 3′ TTTTTG sequence. In some cases, the cassette is operably linked to a promoter that is functional in a eukaryotic cell. In some cases, the cassette is operably linked to an RNA polymerase II promoter. In some cases, the cassette is operably linked to an RNA polymerase III promoter. In some cases, the cassette is operably linked to a CAG promoter. In some cases, the cassette is operably linked to a CBA promoter. In some cases, the cassette is operably linked to a CMV promoter. In some cases, the cassette is operably linked to a U6 promoter. In some cases, the cassette is operably linked to an EF1α promoter. In some cases, the cassette is operably linked to an H1 promoter. In some cases, the recombinant expression vector comprises a 5′ AAV ITR sequence and a 3′ AAV ITR sequence. In some cases, the AAV ITRs are AAV9 ITRs. In some cases, the AAV ITRs are AAV2 ITRs.
27) In some cases, a recombinant expression vector comprises a cassette that comprises the nucleotide sequence: tgcacacctcctggcgggcagctctgCTGCTGCAGCTGCTGATGCTGtgttctggcaatacctgCAGCAACAGCA GCAGCAGCAGCAgggaggcctgccctgactgcccacTTTTTG (SEQ ID NO:605; “CUG_NA_I” in Table 7; FIG. 23). In some cases, the cassette does not include the 3′ TTTTTG sequence. In some cases, the cassette includes the nucleotide sequence Tₙ, where n is an integer from 5 to 10 (e.g., n is 5, 6, 7, 8, 9, or 10), in place of the 3′ TTTTTG sequence. In some cases, the cassette is operably linked to a promoter that is functional in a eukaryotic cell. In some cases, the cassette is operably linked to an RNA polymerase II promoter. In some cases, the cassette is operably linked to an RNA polymerase III promoter. In some cases, the cassette is operably linked to a CAG promoter. In some cases, the cassette is operably linked to a CBA promoter. In some cases, the cassette is operably linked to a CMV promoter. In some cases, the cassette is operably linked to a U6 promoter. In some cases, the cassette is operably linked to an EF1α promoter. In some cases, the cassette is operably linked to an H1 promoter. In some cases, the recombinant expression vector comprises a 5′ AAV ITR sequence and a 3′ AAV ITR sequence. In some cases, the AAV ITRs are AAV9 ITRs. In some cases, the AAV ITRs are AAV2 ITRs.
28) In some cases, a recombinant expression vector comprises a cassette that comprises the nucleotide sequence: tgcacacctcctggcgggcagctctgCTGCTGCTAAAGCTGCTGCTGtgttctggcaatacctgCAGCAGCAGCA AAAGCAGCAGCAgggaggcctgccctgactgcccacTTTTTG (SEQ ID NO:606; “CUG_307” in Table 7; FIG. 23). In some cases, the cassette does not include the 3′ TTTTTG sequence. In some cases, the cassette includes the nucleotide sequence Tₙ, where n is an integer from 5 to 10 (e.g., n is 5, 6, 7, 8, 9, or 10), in place of the 3′ TTTTTG sequence. In some cases, the cassette is operably linked to a promoter that is functional in a eukaryotic cell. In some cases, the cassette is operably linked to an RNA polymerase II promoter. In some cases, the cassette is operably linked to an RNA polymerase III promoter. In some cases, the cassette is operably linked to a CAG promoter. In some cases, the cassette is operably linked to a CBA promoter. In some cases, the cassette is operably linked to a CMV promoter. In some cases, the cassette is operably linked to a U6 promoter. In some cases, the cassette is operably linked to an EF1α promoter. In some cases, the cassette is operably linked to an H1 promoter. In some cases, the recombinant expression vector comprises a 5′ AAV ITR sequence and a 3′ AAV ITR sequence. In some cases, the AAV ITRs are AAV9 ITRs. In some cases, the AAV ITRs are AAV2 ITRs.
29) In some cases, a recombinant expression vector comprises a cassette that comprises the nucleotide sequence: tgcacacctcctggcgggcagctctgCTGCTGCTAATACTGCTGCTGtgttctggcaatacctgCAGCAGCAGAA AAAGCAGCAGCAgggaggcctgccctgactgcccacTTTTTG (SEQ ID NO:607; “CUG_334” in Table 7; FIG. 23). In some cases, the cassette does not include the 3′ TTTTTG sequence. In some cases, the cassette includes the nucleotide sequence Tₙ, where n is an integer from 5 to 10 (e.g., n is 5, 6, 7, 8, 9, or 10), in place of the 3′ TTTTTG sequence. In some cases, the cassette is operably linked to a promoter that is functional in a eukaryotic cell. In some cases, the cassette is operably linked to an RNA polymerase II promoter. In some cases, the cassette is operably linked to an RNA polymerase III promoter. In some cases, the cassette is operably linked to a CAG promoter. In some cases, the cassette is operably linked to a CBA promoter. In some cases, the cassette is operably linked to a CMV promoter. In some cases, the cassette is operably linked to a U6 promoter. In some cases, the cassette is operably linked to an EF1α promoter. In some cases, the cassette is operably linked to an H1 promoter. In some cases, the recombinant expression vector comprises a 5′ AAV ITR sequence and a 3′ AAV ITR sequence. In some cases, the AAV ITRs are AAV9 ITRs. In some cases, the AAV ITRs are AAV2 ITRs.
30) In some cases, a recombinant expression vector comprises a cassette that comprises the nucleotide sequence: tgcacacctcctggcgggcagctctgCTGCTGCTAATGATGCTGCTGtgttctggcaatacctgCAGCAGCAACA AAAGCAGCAGCAgggaggcctgccctgactgcccacTTTTTG (SEQ ID NO:608; “CUG_361” in Table 7; FIG. 23). In some cases, the cassette does not include the 3′ TTTTTG sequence. In some cases, the cassette includes the nucleotide sequence Tₙ, where n is an integer from 5 to 10 (e.g., n is 5, 6, 7, 8, 9, or 10), in place of the 3′ TTTTTG sequence. In some cases, the cassette is operably linked to a promoter that is functional in a eukaryotic cell. In some cases, the cassette is operably linked to an RNA polymerase II promoter. In some cases, the cassette is operably linked to an RNA polymerase III promoter. In some cases, the cassette is operably linked to a CAG promoter. In some cases, the cassette is operably linked to a CBA promoter. In some cases, the cassette is operably linked to a CMV promoter. In some cases, the cassette is operably linked to a U6 promoter. In some cases, the cassette is operably linked to an EF1α promoter. In some cases, the cassette is operably linked to an H1 promoter. In some cases, the recombinant expression vector comprises a 5′ AAV ITR sequence and a 3′ AAV ITR sequence. In some cases, the AAV ITRs are AAV9 ITRs. In some cases, the AAV ITRs are AAV2 ITRs.
31) In some cases, a recombinant expression vector comprises a cassette that comprises the nucleotide sequence: tgcacacctcctggcgggcagctctgCTGCTGCTAATGCAGCTGCTGtgttctggcaatacctgCAGCAGCAGCA AAAGCAGCAGCAgggaggcctgccctgactgcccacTTTTTG (SEQ ID NO:609; “CUG_388” in Table 7; FIG. 23). In some cases, the cassette does not include the 3′ TTTTTG sequence. In some cases, the cassette includes the nucleotide sequence Tₙ, where n is an integer from 5 to 10 (e.g., n is 5, 6, 7, 8, 9, or 10), in place of the 3′ TTTTTG sequence. In some cases, the cassette is operably linked to a promoter that is functional in a eukaryotic cell. In some cases, the cassette is operably linked to an RNA polymerase II promoter. In some cases, the cassette is operably linked to an RNA polymerase III promoter. In some cases, the cassette is operably linked to a CAG promoter. In some cases, the cassette is operably linked to a CBA promoter. In some cases, the cassette is operably linked to a CMV promoter. In some cases, the cassette is operably linked to a U6 promoter. In some cases, the cassette is operably linked to an EF1α promoter. In some cases, the cassette is operably linked to an H1 promoter. In some cases, the recombinant expression vector comprises a 5′ AAV ITR sequence and a 3′ AAV ITR sequence. In some cases, the AAV ITRs are AAV9 ITRs. In some cases, the AAV ITRs are AAV2 ITRs.
32) In some cases, a recombinant expression vector comprises a cassette that comprises the nucleotide sequence: tgcacacctcctggcgggcagctctgCTGCTGCTAATGCTACTGCTGtgttctggcaatacctgCAGCAGAAGCA AAAGCAGCAGCAgggaggcctgccctgactgcccacTTTTTG (SEQ ID NO:610; “CUG_415” in Table 7; FIG. 23). In some cases, the cassette does not include the 3′ TTTTTG sequence. In some cases, the cassette includes the nucleotide sequence Tₙ, where n is an integer from 5 to 10 (e.g., n is 5, 6, 7, 8, 9, or 10), in place of the 3′ TTTTTG sequence. In some cases, the cassette is operably linked to a promoter that is functional in a eukaryotic cell. In some cases, the cassette is operably linked to an RNA polymerase II promoter. In some cases, the cassette is operably linked to an RNA polymerase III promoter. In some cases, the cassette is operably linked to a CAG promoter. In some cases, the cassette is operably linked to a CBA promoter. In some cases, the cassette is operably linked to a CMV promoter. In some cases, the cassette is operably linked to a U6 promoter. In some cases, the cassette is operably linked to an EF1α promoter. In some cases, the cassette is operably linked to an H1 promoter. In some cases, the recombinant expression vector comprises a 5′ AAV ITR sequence and a 3′ AAV ITR sequence. In some cases, the AAV ITRs are AAV9 ITRs. In some cases, the AAV ITRs are AAV2 ITRs.
33) In some cases, a recombinant expression vector comprises a cassette that comprises the nucleotide sequence: tgcacacctcctggcgggcagctctgCTGCTGCTACAGATGCTGCTGtgttctggcaatacctgCAGCAGCAACA GAAGCAGCAGCAgggaggcctgccctgactgcccacTTTTTG (SEQ ID NO:611; “CUG_631” in Table 7; FIG. 23). In some cases, the cassette does not include the 3′ TTTTTG sequence. In some cases, the cassette includes the nucleotide sequence Tₙ, where n is an integer from 5 to 10 (e.g., n is 5, 6, 7, 8, 9, or 10), in place of the 3′ TTTTTG sequence. In some cases, the cassette is operably linked to a promoter that is functional in a eukaryotic cell. In some cases, the cassette is operably linked to an RNA polymerase II promoter. In some cases, the cassette is operably linked to an RNA polymerase III promoter. In some cases, the cassette is operably linked to a CAG promoter. In some cases, the cassette is operably linked to a CBA promoter. In some cases, the cassette is operably linked to a CMV promoter. In some cases, the cassette is operably linked to a U6 promoter. In some cases, the cassette is operably linked to an EF1α promoter. In some cases, the cassette is operably linked to an H1 promoter. In some cases, the recombinant expression vector comprises a 5′ AAV ITR sequence and a 3′ AAV ITR sequence. In some cases, the AAV ITRs are AAV9 ITRs. In some cases, the AAV ITRs are AAV2 ITRs.
34) In some cases, a recombinant expression vector comprises a cassette that comprises the nucleotide sequence: tgcacacctcctggcgggcagctctgCTGCTGCTACAGCAGCTGCTGtgttctggcaatacctgCAGCAGCAGCA GAAGCAGCAGCAgggaggcctgccctgactgcccacTTTTTG (SEQ ID NO:612; “CUG_658” in Table 7; FIG. 23). In some cases, the cassette does not include the 3′ TTTTTG sequence. In some cases, the cassette includes the nucleotide sequence Tₙ, where n is an integer from 5 to 10 (e.g., n is 5, 6, 7, 8, 9, or 10), in place of the 3′ TTTTTG sequence. In some cases, the cassette is operably linked to a promoter that is functional in a eukaryotic cell. In some cases, the cassette is operably linked to an RNA polymerase II promoter. In some cases, the cassette is operably linked to an RNA polymerase III promoter. In some cases, the cassette is operably linked to a CAG promoter. In some cases, the cassette is operably linked to a CBA promoter. In some cases, the cassette is operably linked to a CMV promoter. In some cases, the cassette is operably linked to a U6 promoter. In some cases, the cassette is operably linked to an EF1α promoter. In some cases, the cassette is operably linked to an H1 promoter. In some cases, the recombinant expression vector comprises a 5′ AAV ITR sequence and a 3′ AAV ITR sequence. In some cases, the AAV ITRs are AAV9 ITRs. In some cases, the AAV ITRs are AAV2 ITRs.
35) In some cases, a recombinant expression vector comprises a cassette that comprises the nucleotide sequence: tgcacacctcctggcgggcagctctgCTGCTGCTACAGCTGATGCTGtgttctggcaatacctgCAGCAACAGCA GAAGCAGCAGCAgggaggcctgccctgactgcccacTTTTTG (SEQ ID NO:613; “CUG_712” in Table 7; FIG. 23). In some cases, the cassette does not include the 3′ TTTTTG sequence. In some cases, the cassette includes the nucleotide sequence Tₙ, where n is an integer from 5 to 10 (e.g., n is 5, 6, 7, 8, 9, or 10), in place of the 3′ TTTTTG sequence. In some cases, the cassette is operably linked to a promoter that is functional in a eukaryotic cell. In some cases, the cassette is operably linked to an RNA polymerase II promoter. In some cases, the cassette is operably linked to an RNA polymerase III promoter. In some cases, the cassette is operably linked to a CAG promoter. In some cases, the cassette is operably linked to a CBA promoter. In some cases, the cassette is operably linked to a CMV promoter. In some cases, the cassette is operably linked to a U6 promoter. In some cases, the cassette is operably linked to an EF1α promoter. In some cases, the cassette is operably linked to an H1 promoter. In some cases, the recombinant expression vector comprises a 5′ AAV ITR sequence and a 3′ AAV ITR sequence. In some cases, the AAV ITRs are AAV9 ITRs. In some cases, the AAV ITRs are AAV2 ITRs.
36) In some cases, a recombinant expression vector comprises a cassette that comprises the nucleotide sequence: tgcacacctcctggcgggcagctctgCTGCTGCTGAAGATGCTGCTGtgttctggcaatacctgCAGCAGCAACA ACAGCAGCAGCAgggaggcctgccctgactgcccacTTTTTG (SEQ ID NO:614; “CUG_2116” in Table 7; FIG. 23). In some cases, the cassette does not include the 3′ TTTTTG sequence. In some cases, the cassette includes the nucleotide sequence Tₙ, where n is an integer from 5 to 10 (e.g., n is 5, 6, 7, 8, 9, or 10), in place of the 3′ TTTTTG sequence. In some cases, the cassette is operably linked to a promoter that is functional in a eukaryotic cell. In some cases, the cassette is operably linked to an RNA polymerase II promoter. In some cases, the cassette is operably linked to an RNA polymerase III promoter. In some cases, the cassette is operably linked to a CAG promoter. In some cases, the cassette is operably linked to a CBA promoter. In some cases, the cassette is operably linked to a CMV promoter. In some cases, the cassette is operably linked to a U6 promoter. In some cases, the cassette is operably linked to an EF1α promoter. In some cases, the cassette is operably linked to an H1 promoter. In some cases, the recombinant expression vector comprises a 5′ AAV ITR sequence and a 3′ AAV ITR sequence. In some cases, the AAV ITRs are AAV9 ITRs. In some cases, the AAV ITRs are AAV2 ITRs.
37) In some cases, a recombinant expression vector comprises a cassette that comprises the nucleotide sequence: tgcacacctcctggcgggcagctctgCTGCTGCTGAAGCAGCTGCTGtgttctggcaatacctgCAGCAGCAGCA ACAGCAGCAGCAgggaggcctgccctgactgcccacTTTTTG (SEQ ID NO:615; “CUG_2143” in Table 7; FIG. 23). In some cases, the cassette does not include the 3′ TTTTTG sequence. In some cases, the cassette includes the nucleotide sequence Tₙ, where n is an integer from 5 to 10 (e.g., n is 5, 6, 7, 8, 9, or 10), in place of the 3′ TTTTTG sequence. In some cases, the cassette is operably linked to a promoter that is functional in a eukaryotic cell. In some cases, the cassette is operably linked to an RNA polymerase II promoter. In some cases, the cassette is operably linked to an RNA polymerase III promoter. In some cases, the cassette is operably linked to a CAG promoter. In some cases, the cassette is operably linked to a CBA promoter. In some cases, the cassette is operably linked to a CMV promoter. In some cases, the cassette is operably linked to a U6 promoter. In some cases, the cassette is operably linked to an EF1α promoter. In some cases, the cassette is operably linked to an H1 promoter. In some cases, the recombinant expression vector comprises a 5′ AAV ITR sequence and a 3′ AAV ITR sequence. In some cases, the AAV ITRs are AAV9 ITRs. In some cases, the AAV ITRs are AAV2 ITRs.
38) In some cases, a recombinant expression vector comprises a cassette that comprises the nucleotide sequence: tgcacacctcctggcgggcagctctgCTGCTGCTGAAGCTACTGCTGtgttctggcaatacctgCAGCAGAAGCA ACAGCAGCAGCAgggaggcctgccctgactgcccacTTTTTG (SEQ ID NO:616; “CUG_2170” in Table 7; FIG. 23). In some cases, the cassette does not include the 3′ TTTTTG sequence. In some cases, the cassette includes the nucleotide sequence Tₙ, where n is an integer from 5 to 10 (e.g., n is 5, 6, 7, 8, 9, or 10), in place of the 3′ TTTTTG sequence. In some cases, the cassette is operably linked to a promoter that is functional in a eukaryotic cell. In some cases, the cassette is operably linked to an RNA polymerase II promoter. In some cases, the cassette is operably linked to an RNA polymerase III promoter. In some cases, the cassette is operably linked to a CAG promoter. In some cases, the cassette is operably linked to a CBA promoter. In some cases, the cassette is operably linked to a CMV promoter. In some cases, the cassette is operably linked to a U6 promoter. In some cases, the cassette is operably linked to an EF1α promoter. In some cases, the cassette is operably linked to an H1 promoter. In some cases, the recombinant expression vector comprises a 5′ AAV ITR sequence and a 3′ AAV ITR sequence. In some cases, the AAV ITRs are AAV9 ITRs. In some cases, the AAV ITRs are AAV2 ITRs.
39) In some cases, a recombinant expression vector comprises a cassette that comprises the nucleotide sequence: tgcacacctcctggcgggcagctctgCTGCTGCTAATGCTGATGCTGtgttctggcaatacctgCAGCAACAGCA AAAGCAGCAGCAgggaggcctgccctgactgcccacTTTTTG (SEQ ID NO:617; “CUG_442” in Table 7; FIG. 23). In some cases, the cassette does not include the 3′ TTTTTG sequence. In some cases, the cassette includes the nucleotide sequence Tₙ, where n is an integer from 5 to 10 (e.g., n is 5, 6, 7, 8, 9, or 10), in place of the 3′ TTTTTG sequence. In some cases, the cassette is operably linked to a promoter that is functional in a eukaryotic cell. In some cases, the cassette is operably linked to an RNA polymerase II promoter. In some cases, the cassette is operably linked to an RNA polymerase III promoter. In some cases, the cassette is operably linked to a CAG promoter. In some cases, the cassette is operably linked to a CBA promoter. In some cases, the cassette is operably linked to a CMV promoter. In some cases, the cassette is operably linked to a U6 promoter. In some cases, the cassette is operably linked to an EF1α promoter. In some cases, the cassette is operably linked to an H1 promoter. In some cases, the recombinant expression vector comprises a 5′ AAV ITR sequence and a 3′ AAV ITR sequence. In some cases, the AAV ITRs are AAV9 ITRs. In some cases, the AAV ITRs are AAV2 ITRs.
40) In some cases, a recombinant expression vector comprises a cassette that comprises the nucleotide sequence: tgcacacctcctggcgggcagctctgCTGCTGCTACAACTGCTGCTGtgttctggcaatacctgCAGCAGCAGAA GAAGCAGCAGCAgggaggcctgccctgactgcccacTTTTTG (SEQ ID NO:618; “CUG_604” in Table 7; FIG. 23). In some cases, the cassette does not include the 3′ TTTTTG sequence. In some cases, the cassette includes the nucleotide sequence Tₙ, where n is an integer from 5 to 10 (e.g., n is 5, 6, 7, 8, 9, or 10), in place of the 3′ TTTTTG sequence. In some cases, the cassette is operably linked to a promoter that is functional in a eukaryotic cell. In some cases, the cassette is operably linked to an RNA polymerase II promoter. In some cases, the cassette is operably linked to an RNA polymerase III promoter. In some cases, the cassette is operably linked to a CAG promoter. In some cases, the cassette is operably linked to a CBA promoter. In some cases, the cassette is operably linked to a CMV promoter. In some cases, the cassette is operably linked to a U6 promoter. In some cases, the cassette is operably linked to an EF1α promoter. In some cases, the cassette is operably linked to an H1 promoter. In some cases, the recombinant expression vector comprises a 5′ AAV ITR sequence and a 3′ AAV ITR sequence. In some cases, the AAV ITRs are AAV9 ITRs. In some cases, the AAV ITRs are AAV2 ITRs.
41) In some cases, a recombinant expression vector comprises a cassette that comprises the nucleotide sequence: tgcacacctcctggcgggcagctctgCTGCTGCTACAGCTACTGCTGtgttctggcaatacctgCAGCAGAAGCA GAAGCAGCAGCAgggaggcctgccctgactgcccacTTTTTG (SEQ ID NO:619; “CUG_685” in Table 7; FIG. 23). In some cases, the cassette does not include the 3′ TTTTTG sequence. In some cases, the cassette includes the nucleotide sequence Tₙ, where n is an integer from 5 to 10 (e.g., n is 5, 6, 7, 8, 9, or 10), in place of the 3′ TTTTTG sequence. In some cases, the cassette is operably linked to a promoter that is functional in a eukaryotic cell. In some cases, the cassette is operably linked to an RNA polymerase II promoter. In some cases, the cassette is operably linked to an RNA polymerase III promoter. In some cases, the cassette is operably linked to a CAG promoter. In some cases, the cassette is operably linked to a CBA promoter. In some cases, the cassette is operably linked to a CMV promoter. In some cases, the cassette is operably linked to a U6 promoter. In some cases, the cassette is operably linked to an EF1α promoter. In some cases, the cassette is operably linked to an H1 promoter. In some cases, the recombinant expression vector comprises a 5′ AAV ITR sequence and a 3′ AAV ITR sequence. In some cases, the AAV ITRs are AAV9 ITRs. In some cases, the AAV ITRs are AAV2 ITRs.
42) In some cases, a recombinant expression vector comprises a cassette that comprises the nucleotide sequence: tgcacacctcctggcgggcagctctgCTGCTGCTGAAACTGCTGCTGtgttctggcaatacctgCAGCAGCAGAA ACAGCAGCAGCAgggaggcctgccctgactgcccacTTTTTG (SEQ ID NO:620; “CUG_2089” in Table 7; FIG. 23). In some cases, the cassette does not include the 3′ TTTTTG sequence. In some cases, the cassette includes the nucleotide sequence Tₙ, where n is an integer from 5 to 10 (e.g., n is 5, 6, 7, 8, 9, or 10), in place of the 3′ TTTTTG sequence. In some cases, the cassette is operably linked to a promoter that is functional in a eukaryotic cell. In some cases, the cassette is operably linked to an RNA polymerase II promoter. In some cases, the cassette is operably linked to an RNA polymerase III promoter. In some cases, the cassette is operably linked to a CAG promoter. In some cases, the cassette is operably linked to a CBA promoter. In some cases, the cassette is operably linked to a CMV promoter. In some cases, the cassette is operably linked to a U6 promoter. In some cases, the cassette is operably linked to an EF1α promoter. In some cases, the cassette is operably linked to an H1 promoter. In some cases, the recombinant expression vector comprises a 5′ AAV ITR sequence and a 3′ AAV ITR sequence. In some cases, the AAV ITRs are AAV9 ITRs. In some cases, the AAV ITRs are AAV2 ITRs.
43) In some cases, a recombinant expression vector comprises a cassette that comprises the nucleotide sequence: tgcacacctcctggcgggcagctctgCTGCTGCTGAAGCTGATGCTGtgttctggcaatacctgCAGCAACAGCA ACAGCAGCAGCAgggaggcctgccctgactgcccacTTTTTG (SEQ ID NO:621; “CUG_2197” in Table 7; FIG. 23). In some cases, the cassette does not include the 3′ TTTTTG sequence. In some cases, the cassette includes the nucleotide sequence Tₙ, where n is an integer from 5 to 10 (e.g., n is 5, 6, 7, 8, 9, or 10), in place of the 3′ TTTTTG sequence. In some cases, the cassette is operably linked to a promoter that is functional in a eukaryotic cell. In some cases, the cassette is operably linked to an RNA polymerase II promoter. In some cases, the cassette is operably linked to an RNA polymerase III promoter. In some cases, the cassette is operably linked to a CAG promoter. In some cases, the cassette is operably linked to a CBA promoter. In some cases, the cassette is operably linked to a CMV promoter. In some cases, the cassette is operably linked to a U6 promoter. In some cases, the cassette is operably linked to an EF1α promoter. In some cases, the cassette is operably linked to an H1 promoter. In some cases, the recombinant expression vector comprises a 5′ AAV ITR sequence and a 3′ AAV ITR sequence. In some cases, the AAV ITRs are AAV9 ITRs. In some cases, the AAV ITRs are AAV2 ITRs.
44) In some cases, a recombinant expression vector comprises a cassette that comprises the nucleotide sequence: tgcacacctcctggcgggcagctctgCTGCTGCTAAAGATGCTGCTGtgttctggcaatacctgCAGCAGCAACA AAAGCAGCAGCAgggaggcctgccctgactgcccacTTTTTG (SEQ ID NO:622; “CUG_4870” in Table 7; FIG. 23). In some cases, the cassette does not include the 3′ TTTTTG sequence. In some cases, the cassette includes the nucleotide sequence Tₙ, where n is an integer from 5 to 10 (e.g., n is 5, 6, 7, 8, 9, or 10), in place of the 3′ TTTTTG sequence. In some cases, the cassette is operably linked to a promoter that is functional in a eukaryotic cell. In some cases, the cassette is operably linked to an RNA polymerase II promoter. In some cases, the cassette is operably linked to an RNA polymerase III promoter. In some cases, the cassette is operably linked to a CAG promoter. In some cases, the cassette is operably linked to a CBA promoter. In some cases, the cassette is operably linked to a CMV promoter. In some cases, the cassette is operably linked to a U6 promoter. In some cases, the cassette is operably linked to an EF1α promoter. In some cases, the cassette is operably linked to an H1 promoter. In some cases, the recombinant expression vector comprises a 5′ AAV ITR sequence and a 3′ AAV ITR sequence. In some cases, the AAV ITRs are AAV9 ITRs. In some cases, the AAV ITRs are AAV2 ITRs.
45) In some cases, a recombinant expression vector comprises a cassette that comprises the nucleotide sequence: tgcacacctcctggcgggcagctctgCTGCTGCTACAGAAGCTGCTGtgttctggcaatacctgCAGCAGCAACA GAAGCAGCAGCAgggaggcctgccctgactgcccacTTTTTG (SEQ ID NO:623; “CUG_9973” in Table 7; FIG. 23). In some cases, the cassette does not include the 3′ TTTTTG sequence. In some cases, the cassette includes the nucleotide sequence Tₙ, where n is an integer from 5 to 10 (e.g., n is 5, 6, 7, 8, 9, or 10), in place of the 3′ TTTTTG sequence. In some cases, the cassette is operably linked to a promoter that is functional in a eukaryotic cell. In some cases, the cassette is operably linked to an RNA polymerase II promoter. In some cases, the cassette is operably linked to an RNA polymerase III promoter. In some cases, the cassette is operably linked to a CAG promoter. In some cases, the cassette is operably linked to a CBA promoter. In some cases, the cassette is operably linked to a CMV promoter. In some cases, the cassette is operably linked to a U6 promoter. In some cases, the cassette is operably linked to an EF1α promoter. In some cases, the cassette is operably linked to an H1 promoter. In some cases, the recombinant expression vector comprises a 5′ AAV ITR sequence and a 3′ AAV ITR sequence. In some cases, the AAV ITRs are AAV9 ITRs. In some cases, the AAV ITRs are AAV2 ITRs.
46) In some cases, a recombinant expression vector comprises a cassette that comprises the nucleotide sequence: tgcacacctcctggcgggcagctctgCTGCTGCTACAGATGATGCTGtgttctggcaatacctgCAGCAACAACA GAAGCAGCAGCAgggaggcctgccctgactgcccacTTTTTG (SEQ ID NO:624; “CUG_1013” in Table 7; FIG. 23). In some cases, the cassette does not include the 3′ TTTTTG sequence. In some cases, the cassette includes the nucleotide sequence Tₙ, where n is an integer from 5 to 10 (e.g., n is 5, 6, 7, 8, 9, or 10), in place of the 3′ TTTTTG sequence. In some cases, the cassette is operably linked to a promoter that is functional in a eukaryotic cell. In some cases, the cassette is operably linked to an RNA polymerase II promoter. In some cases, the cassette is operably linked to an RNA polymerase III promoter. In some cases, the cassette is operably linked to a CAG promoter. In some cases, the cassette is operably linked to a CBA promoter. In some cases, the cassette is operably linked to a CMV promoter. In some cases, the cassette is operably linked to a U6 promoter. In some cases, the cassette is operably linked to an EF1α promoter. In some cases, the cassette is operably linked to an H1 promoter. In some cases, the recombinant expression vector comprises a 5′ AAV ITR sequence and a 3′ AAV ITR sequence. In some cases, the AAV ITRs are AAV9 ITRs. In some cases, the AAV ITRs are AAV2 ITRs.
47) In some cases, a recombinant expression vector comprises a cassette that comprises the nucleotide sequence: tgcacacctcctggcgggcagctctgCTGCTGCTACAGCAGATGCTGtgttctggcaatacctgCAGCAACAGCA GAAGCAGCAGCAgggaggcctgccctgactgcccacTTTTTG (SEQ ID NO:625; “CUG_1070” in Table 7; FIG. 23). In some cases, the cassette does not include the 3′ TTTTTG sequence. In some cases, the cassette includes the nucleotide sequence Tₙ, where n is an integer from 5 to 10 (e.g., n is 5, 6, 7, 8, 9, or 10), in place of the 3′ TTTTTG sequence. In some cases, the cassette is operably linked to a promoter that is functional in a eukaryotic cell. In some cases, the cassette is operably linked to an RNA polymerase II promoter. In some cases, the cassette is operably linked to an RNA polymerase III promoter. In some cases, the cassette is operably linked to a CAG promoter. In some cases, the cassette is operably linked to a CBA promoter. In some cases, the cassette is operably linked to a CMV promoter. In some cases, the cassette is operably linked to a U6 promoter. In some cases, the cassette is operably linked to an EF1α promoter. In some cases, the cassette is operably linked to an H1 promoter. In some cases, the recombinant expression vector comprises a 5′ AAV ITR sequence and a 3′ AAV ITR sequence. In some cases, the AAV ITRs are AAV9 ITRs. In some cases, the AAV ITRs are AAV2 ITRs.
48) In some cases, a recombinant expression vector comprises a cassette that comprises the nucleotide sequence: tgcacacctcctggcgggcagctctgCTGCTGCTGAAGATACTGCTGtgttctggcaatacctgCAGCAGAAACA ACAGCAGCAGCAgggaggcctgccctgactgcccacTTTTTG (SEQ ID NO:626; “CUG_2341” in Table 7; FIG. 23). In some cases, the cassette does not include the 3′ TTTTTG sequence. In some cases, the cassette includes the nucleotide sequence Tₙ, where n is an integer from 5 to 10 (e.g., n is 5, 6, 7, 8, 9, or 10), in place of the 3′ TTTTTG sequence. In some cases, the cassette is operably linked to a promoter that is functional in a eukaryotic cell. In some cases, the cassette is operably linked to an RNA polymerase II promoter. In some cases, the cassette is operably linked to an RNA polymerase III promoter. In some cases, the cassette is operably linked to a CAG promoter. In some cases, the cassette is operably linked to a CBA promoter. In some cases, the cassette is operably linked to a CMV promoter. In some cases, the cassette is operably linked to a U6 promoter. In some cases, the cassette is operably linked to an EF1α promoter. In some cases, the cassette is operably linked to an H1 promoter. In some cases, the recombinant expression vector comprises a 5′ AAV ITR sequence and a 3′ AAV ITR sequence. In some cases, the AAV ITRs are AAV9 ITRs. In some cases, the AAV ITRs are AAV2 ITRs.
49) In some cases, a recombinant expression vector comprises a cassette that comprises the nucleotide sequence: tgcacacctcctggcgggcagctctgCTGCTGCTGAAGCAACTGCTGtgttctggcaatacctgCAGCAGAAGCA ACAGCAGCAGCAgggaggcctgccctgactgcccacTTTTTG (SEQ ID NO:627; “CUG_2398” in Table 7; FIG. 23). In some cases, the cassette does not include the 3′ TTTTTG sequence. In some cases, the cassette includes the nucleotide sequence Tₙ, where n is an integer from 5 to 10 (e.g., n is 5, 6, 7, 8, 9, or 10), in place of the 3′ TTTTTG sequence. In some cases, the cassette is operably linked to a promoter that is functional in a eukaryotic cell. In some cases, the cassette is operably linked to an RNA polymerase II promoter. In some cases, the cassette is operably linked to an RNA polymerase III promoter. In some cases, the cassette is operably linked to a CAG promoter. In some cases, the cassette is operably linked to a CBA promoter. In some cases, the cassette is operably linked to a CMV promoter. In some cases, the cassette is operably linked to a U6 promoter. In some cases, the cassette is operably linked to an EF1α promoter. In some cases, the cassette is operably linked to an H1 promoter. In some cases, the recombinant expression vector comprises a 5′ AAV ITR sequence and a 3′ AAV ITR sequence. In some cases, the AAV ITRs are AAV9 ITRs. In some cases, the AAV ITRs are AAV2 ITRs.
50) In some cases, a recombinant expression vector comprises a cassette that comprises the nucleotide sequence: tgcacacctcctggcgggcagctctgCTGCTGCTAAAACTGCTGCTGtgttctggcaatacctgCAGCAGCAGAA AAAGCAGCAGCAgggaggcctgccctgactgcccacTTTTTG (SEQ ID NO:628; “CUG_4789” in Table 7; FIG. 23). In some cases, the cassette does not include the 3′ TTTTTG sequence. In some cases, the cassette includes the nucleotide sequence Tₙ, where n is an integer from 5 to 10 (e.g., n is 5, 6, 7, 8, 9, or 10), in place of the 3′ TTTTTG sequence. In some cases, the cassette is operably linked to a promoter that is functional in a eukaryotic cell. In some cases, the cassette is operably linked to an RNA polymerase II promoter. In some cases, the cassette is operably linked to an RNA polymerase III promoter. In some cases, the cassette is operably linked to a CAG promoter. In some cases, the cassette is operably linked to a CBA promoter. In some cases, the cassette is operably linked to a CMV promoter. In some cases, the cassette is operably linked to a U6 promoter. In some cases, the cassette is operably linked to an EF1α promoter. In some cases, the cassette is operably linked to an H1 promoter. In some cases, the recombinant expression vector comprises a 5′ AAV ITR sequence and a 3′ AAV ITR sequence. In some cases, the AAV ITRs are AAV9 ITRs. In some cases, the AAV ITRs are AAV2 ITRs.
51) In some cases, a recombinant expression vector comprises a cassette that comprises the nucleotide sequence: tgcacacctcctggcgggcagctctgCTGCTGCTAAAGCAGCTGCTGtgttctggcaatacctgCAGCAGCAGCA AAAGCAGCAGCAgggaggcctgccctgactgcccacTTTTTG (SEQ ID NO:629; “CUG_4951” in Table 7; FIG. 23). In some cases, the cassette does not include the 3′ TTTTTG sequence. In some cases, the cassette includes the nucleotide sequence Tₙ, where n is an integer from 5 to 10 (e.g., n is 5, 6, 7, 8, 9, or 10), in place of the 3′ TTTTTG sequence. In some cases, the cassette is operably linked to a promoter that is functional in a eukaryotic cell. In some cases, the cassette is operably linked to an RNA polymerase II promoter. In some cases, the cassette is operably linked to an RNA polymerase III promoter. In some cases, the cassette is operably linked to a CAG promoter. In some cases, the cassette is operably linked to a CBA promoter. In some cases, the cassette is operably linked to a CMV promoter. In some cases, the cassette is operably linked to a U6 promoter. In some cases, the cassette is operably linked to an EF1α promoter. In some cases, the cassette is operably linked to an H1 promoter. In some cases, the recombinant expression vector comprises a 5′ AAV ITR sequence and a 3′ AAV ITR sequence. In some cases, the AAV ITRs are AAV9 ITRs. In some cases, the AAV ITRs are AAV2 ITRs.
52) In some cases, a recombinant expression vector comprises a cassette that comprises the nucleotide sequence: tgcacacctcctggcgggcagctctgCTGCTGCTAAAGCTACTGCTGtgttctggcaatacctgCAGCAGAAGCA AAAGCAGCAGCAgggaggcctgccctgactgcccacTTTTTG (SEQ ID NO:630; “CUG_5032” in Table 7; FIG. 23). In some cases, the cassette does not include the 3′ TTTTTG sequence. In some cases, the cassette includes the nucleotide sequence Tₙ, where n is an integer from 5 to 10 (e.g., n is 5, 6, 7, 8, 9, or 10), in place of the 3′ TTTTTG sequence. In some cases, the cassette is operably linked to a promoter that is functional in a eukaryotic cell. In some cases, the cassette is operably linked to an RNA polymerase II promoter. In some cases, the cassette is operably linked to an RNA polymerase III promoter. In some cases, the cassette is operably linked to a CAG promoter. In some cases, the cassette is operably linked to a CBA promoter. In some cases, the cassette is operably linked to a CMV promoter. In some cases, the cassette is operably linked to a U6 promoter. In some cases, the cassette is operably linked to an EF1α promoter. In some cases, the cassette is operably linked to an H1 promoter. In some cases, the recombinant expression vector comprises a 5′ AAV ITR sequence and a 3′ AAV ITR sequence. In some cases, the AAV ITRs are AAV9 ITRs. In some cases, the AAV ITRs are AAV2 ITRs.
53) In some cases, a recombinant expression vector comprises a cassette that comprises the nucleotide sequence: tgcacacctcctggcgggcagctctgCTGCTGCTAAAGCTGATGCTGtgttctggcaatacctgCAGCAACAGCA AAAGCAGCAGCAgggaggcctgccctgactgcccacTTTTTG (SEQ ID NO:631; “CUG_5113” in Table 7; FIG. 23). In some cases, the cassette does not include the 3′ TTTTTG sequence. In some cases, the cassette includes the nucleotide sequence Tₙ, where n is an integer from 5 to 10 (e.g., n is 5, 6, 7, 8, 9, or 10), in place of the 3′ TTTTTG sequence. In some cases, the cassette is operably linked to a promoter that is functional in a eukaryotic cell. In some cases, the cassette is operably linked to an RNA polymerase II promoter. In some cases, the cassette is operably linked to an RNA polymerase III promoter. In some cases, the cassette is operably linked to a CAG promoter. In some cases, the cassette is operably linked to a CBA promoter. In some cases, the cassette is operably linked to a CMV promoter. In some cases, the cassette is operably linked to a U6 promoter. In some cases, the cassette is operably linked to an EF1α promoter. In some cases, the cassette is operably linked to an H1 promoter. In some cases, the recombinant expression vector comprises a 5′ AAV ITR sequence and a 3′ AAV ITR sequence. In some cases, the AAV ITRs are AAV9 ITRs. In some cases, the AAV ITRs are AAV2 ITRs.
54) In some cases, a recombinant expression vector comprises a cassette that comprises the nucleotide sequence: tgcacacctcctggcgggcagctctgCTGCTGCTAATAATGCTGCTGtgttctggcaatacctgCAGCAGCAAAA AAAGCAGCAGCAgggaggcctgccctgactgcccacTTTTTG (SEQ ID NO:632; “CUG_5599” in Table 7; FIG. 23). In some cases, the cassette does not include the 3′ TTTTTG sequence. In some cases, the cassette includes the nucleotide sequence Tₙ, where n is an integer from 5 to 10 (e.g., n is 5, 6, 7, 8, 9, or 10), in place of the 3′ TTTTTG sequence. In some cases, the cassette is operably linked to a promoter that is functional in a eukaryotic cell. In some cases, the cassette is operably linked to an RNA polymerase II promoter. In some cases, the cassette is operably linked to an RNA polymerase III promoter. In some cases, the cassette is operably linked to a CAG promoter. In some cases, the cassette is operably linked to a CBA promoter. In some cases, the cassette is operably linked to a CMV promoter. In some cases, the cassette is operably linked to a U6 promoter. In some cases, the cassette is operably linked to an EF1α promoter. In some cases, the cassette is operably linked to an H1 promoter. In some cases, the recombinant expression vector comprises a 5′ AAV ITR sequence and a 3′ AAV ITR sequence. In some cases, the AAV ITRs are AAV9 ITRs. In some cases, the AAV ITRs are AAV2 ITRs.
55) In some cases, a recombinant expression vector comprises a cassette that comprises the nucleotide sequence: tgcacacctcctggcgggcagctctgCTGCTGCTAATACAGCTGCTGtgttctggcaatacctgCAGCAGCAGAA AAAGCAGCAGCAgggaggcctgccctgactgcccacTTTTTG (SEQ ID NO:633; “CUG_5680” in Table 7; FIG. 23). In some cases, the cassette does not include the 3′ TTTTTG sequence. In some cases, the cassette includes the nucleotide sequence Tₙ, where n is an integer from 5 to 10 (e.g., n is 5, 6, 7, 8, 9, or 10), in place of the 3′ TTTTTG sequence. In some cases, the cassette is operably linked to a promoter that is functional in a eukaryotic cell. In some cases, the cassette is operably linked to an RNA polymerase II promoter. In some cases, the cassette is operably linked to an RNA polymerase III promoter. In some cases, the cassette is operably linked to a CAG promoter. In some cases, the cassette is operably linked to a CBA promoter. In some cases, the cassette is operably linked to a CMV promoter. In some cases, the cassette is operably linked to a U6 promoter. In some cases, the cassette is operably linked to an EF1α promoter. In some cases, the cassette is operably linked to an H1 promoter. In some cases, the recombinant expression vector comprises a 5′ AAV ITR sequence and a 3′ AAV ITR sequence. In some cases, the AAV ITRs are AAV9 ITRs. In some cases, the AAV ITRs are AAV2 ITRs.
56) In some cases, a recombinant expression vector comprises a cassette that comprises the nucleotide sequence: tgcacacctcctggcgggcagctctgCTGCTGCTAATACTACTGCTGtgttctggcaatacctgCAGCAGAAGAA AAAGCAGCAGCAgggaggcctgccctgactgcccacTTTTTG (SEQ ID NO:634 “CUG_5761” in Table 7; FIG. 23). In some cases, the cassette does not include the 3′ TTTTTG sequence. In some cases, the cassette includes the nucleotide sequence Tₙ, where n is an integer from 5 to 10 (e.g., n is 5, 6, 7, 8, 9, or 10), in place of the 3′ TTTTTG sequence. In some cases, the cassette is operably linked to a promoter that is functional in a eukaryotic cell. In some cases, the cassette is operably linked to an RNA polymerase II promoter. In some cases, the cassette is operably linked to an RNA polymerase III promoter. In some cases, the cassette is operably linked to a CAG promoter. In some cases, the cassette is operably linked to a CBA promoter. In some cases, the cassette is operably linked to a CMV promoter. In some cases, the cassette is operably linked to a U6 promoter. In some cases, the cassette is operably linked to an EF1α promoter. In some cases, the cassette is operably linked to an H1 promoter. In some cases, the recombinant expression vector comprises a 5′ AAV ITR sequence and a 3′ AAV ITR sequence. In some cases, the AAV ITRs are AAV9 ITRs. In some cases, the AAV ITRs are AAV2 ITRs.
57) In some cases, a recombinant expression vector comprises a cassette that comprises the nucleotide sequence: tgcacacctcctggcgggcagctctgCTGCTGCTAATACTGATGCTGtgttctggcaatacctgCAGCAACAGAA AAAGCAGCAGCAgggaggcctgccctgactgcccacTTTTTG (SEQ ID NO:635; “CUG_5842” in Table 7; FIG. 23). In some cases, the cassette does not include the 3′ TTTTTG sequence. In some cases, the cassette includes the nucleotide sequence Tₙ, where n is an integer from 5 to 10 (e.g., n is 5, 6, 7, 8, 9, or 10), in place of the 3′ TTTTTG sequence. In some cases, the cassette is operably linked to a promoter that is functional in a eukaryotic cell. In some cases, the cassette is operably linked to an RNA polymerase II promoter. In some cases, the cassette is operably linked to an RNA polymerase III promoter. In some cases, the cassette is operably linked to a CAG promoter. In some cases, the cassette is operably linked to a CBA promoter. In some cases, the cassette is operably linked to a CMV promoter. In some cases, the cassette is operably linked to a U6 promoter. In some cases, the cassette is operably linked to an EF1α promoter. In some cases, the cassette is operably linked to an H1 promoter. In some cases, the recombinant expression vector comprises a 5′ AAV ITR sequence and a 3′ AAV ITR sequence. In some cases, the AAV ITRs are AAV9 ITRs. In some cases, the AAV ITRs are AAV2 ITRs.
58) In some cases, a recombinant expression vector comprises a cassette that comprises the nucleotide sequence: tgcacacctcctggcgggcagctctgCTGCTGCTAATGAAGCTGCTGtgttctggcaatacctgCAGCAGCAACA AAAGCAGCAGCAgggaggcctgccctgactgcccacTTTTTG (SEQ ID NO:636; “CUG_6328” in Table 7; FIG. 23). In some cases, the cassette does not include the 3′ TTTTTG sequence. In some cases, the cassette includes the nucleotide sequence Tₙ, where n is an integer from 5 to 10 (e.g., n is 5, 6, 7, 8, 9, or 10), in place of the 3′ TTTTTG sequence. In some cases, the cassette is operably linked to a promoter that is functional in a eukaryotic cell. In some cases, the cassette is operably linked to an RNA polymerase II promoter. In some cases, the cassette is operably linked to an RNA polymerase III promoter. In some cases, the cassette is operably linked to a CAG promoter. In some cases, the cassette is operably linked to a CBA promoter. In some cases, the cassette is operably linked to a CMV promoter. In some cases, the cassette is operably linked to a U6 promoter. In some cases, the cassette is operably linked to an EF1α promoter. In some cases, the cassette is operably linked to an H1 promoter. In some cases, the recombinant expression vector comprises a 5′ AAV ITR sequence and a 3′ AAV ITR sequence. In some cases, the AAV ITRs are AAV9 ITRs. In some cases, the AAV ITRs are AAV2 ITRs.
59) In some cases, a recombinant expression vector comprises a cassette that comprises the nucleotide sequence: tgcacacctcctggcgggcagctctgCTGCTGCTAATGATACTGCTGtgttctggcaatacctgCAGCAGAAACA AAAGCAGCAGCAgggaggcctgccctgactgcccacTTTTTG (SEQ ID NO:637; “CUG_6409” in Table 7; FIG. 23). In some cases, the cassette does not include the 3′ TTTTTG sequence. In some cases, the cassette includes the nucleotide sequence Tₙ, where n is an integer from 5 to 10 (e.g., n is 5, 6, 7, 8, 9, or 10), in place of the 3′ TTTTTG sequence. In some cases, the cassette is operably linked to a promoter that is functional in a eukaryotic cell. In some cases, the cassette is operably linked to an RNA polymerase II promoter. In some cases, the cassette is operably linked to an RNA polymerase III promoter. In some cases, the cassette is operably linked to a CAG promoter. In some cases, the cassette is operably linked to a CBA promoter. In some cases, the cassette is operably linked to a CMV promoter. In some cases, the cassette is operably linked to a U6 promoter. In some cases, the cassette is operably linked to an EF1α promoter. In some cases, the cassette is operably linked to an H1 promoter. In some cases, the recombinant expression vector comprises a 5′ AAV ITR sequence and a 3′ AAV ITR sequence. In some cases, the AAV ITRs are AAV9 ITRs. In some cases, the AAV ITRs are AAV2 ITRs.
60) In some cases, a recombinant expression vector comprises a cassette that comprises the nucleotide sequence: tgcacacctcctggcgggcagctctgCTGCTGCTAATGATGATGCTGtgttctggcaatacctgCAGCAACAACA AAAGCAGCAGCAgggaggcctgccctgactgcccacTTTTTG (SEQ ID NO:638; “CUG_6490” in Table 7; FIG. 23). In some cases, the cassette does not include the 3′ TTTTTG sequence. In some cases, the cassette includes the nucleotide sequence Tₙ, where n is an integer from 5 to 10 (e.g., n is 5, 6, 7, 8, 9, or 10), in place of the 3′ TTTTTG sequence. In some cases, the cassette is operably linked to a promoter that is functional in a eukaryotic cell. In some cases, the cassette is operably linked to an RNA polymerase II promoter. In some cases, the cassette is operably linked to an RNA polymerase III promoter. In some cases, the cassette is operably linked to a CAG promoter. In some cases, the cassette is operably linked to a CBA promoter. In some cases, the cassette is operably linked to a CMV promoter. In some cases, the cassette is operably linked to a U6 promoter. In some cases, the cassette is operably linked to an EF1α promoter. In some cases, the cassette is operably linked to an H1 promoter. In some cases, the recombinant expression vector comprises a 5′ AAV ITR sequence and a 3′ AAV ITR sequence. In some cases, the AAV ITRs are AAV9 ITRs. In some cases, the AAV ITRs are AAV2 ITRs.
61) In some cases, a recombinant expression vector comprises a cassette that comprises the nucleotide sequence: tgcacacctcctggcgggcagctctgCTGCTGCTAATGCAACTGCTGtgttctggcaatacctgCAGCAGAAGCA AAAGCAGCAGCAgggaggcctgccctgactgcccacTTTTTG (SEQ ID NO:639; “CUG_6976” in Table 7; FIG. 23). In some cases, the cassette does not include the 3′ TTTTTG sequence. In some cases, the cassette includes the nucleotide sequence Tₙ, where n is an integer from 5 to 10 (e.g., n is 5, 6, 7, 8, 9, or 10), in place of the 3′ TTTTTG sequence. In some cases, the cassette is operably linked to a promoter that is functional in a eukaryotic cell. In some cases, the cassette is operably linked to an RNA polymerase II promoter. In some cases, the cassette is operably linked to an RNA polymerase III promoter. In some cases, the cassette is operably linked to a CAG promoter. In some cases, the cassette is operably linked to a CBA promoter. In some cases, the cassette is operably linked to a CMV promoter. In some cases, the cassette is operably linked to a U6 promoter. In some cases, the cassette is operably linked to an EF1α promoter. In some cases, the cassette is operably linked to an H1 promoter. In some cases, the recombinant expression vector comprises a 5′ AAV ITR sequence and a 3′ AAV ITR sequence. In some cases, the AAV ITRs are AAV9 ITRs. In some cases, the AAV ITRs are AAV2 ITRs.
62) In some cases, a recombinant expression vector comprises a cassette that comprises the nucleotide sequence: tgcacacctcctggcgggcagctctgCTGCTGCTAATGCAGATGCTGtgttctggcaatacctgCAGCAACAGCA AAAGCAGCAGCAgggaggcctgccctgactgcccacTTTTTG (SEQ ID NO:640; “CUG_7057” in Table 7; FIG. 23). In some cases, the cassette does not include the 3′ TTTTTG sequence. In some cases, the cassette includes the nucleotide sequence Tₙ, where n is an integer from 5 to 10 (e.g., n is 5, 6, 7, 8, 9, or 10), in place of the 3′ TTTTTG sequence. In some cases, the cassette is operably linked to a promoter that is functional in a eukaryotic cell. In some cases, the cassette is operably linked to an RNA polymerase II promoter. In some cases, the cassette is operably linked to an RNA polymerase III promoter. In some cases, the cassette is operably linked to a CAG promoter. In some cases, the cassette is operably linked to a CBA promoter. In some cases, the cassette is operably linked to a CMV promoter. In some cases, the cassette is operably linked to a U6 promoter. In some cases, the cassette is operably linked to an EF1α promoter. In some cases, the cassette is operably linked to an H1 promoter. In some cases, the recombinant expression vector comprises a 5′ AAV ITR sequence and a 3′ AAV ITR sequence. In some cases, the AAV ITRs are AAV9 ITRs. In some cases, the AAV ITRs are AAV2 ITRs.
63) In some cases, a recombinant expression vector comprises a cassette that comprises the nucleotide sequence: tgcacacctcctggcgggcagctctgCTGCTGCTAATGCTAATGCTGtgttctggcaatacctgCAGCAAAAGCA AAAGCAGCAGCAgggaggcctgccctgactgcccacTTTTTG (SEQ ID NO:641; “CUG_7543” in Table 7; FIG. 23). In some cases, the cassette does not include the 3′ TTTTTG sequence. In some cases, the cassette includes the nucleotide sequence Tₙ, where n is an integer from 5 to 10 (e.g., n is 5, 6, 7, 8, 9, or 10), in place of the 3′ TTTTTG sequence. In some cases, the cassette is operably linked to a promoter that is functional in a eukaryotic cell. In some cases, the cassette is operably linked to an RNA polymerase II promoter. In some cases, the cassette is operably linked to an RNA polymerase III promoter. In some cases, the cassette is operably linked to a CAG promoter. In some cases, the cassette is operably linked to a CBA promoter. In some cases, the cassette is operably linked to a CMV promoter. In some cases, the cassette is operably linked to a U6 promoter. In some cases, the cassette is operably linked to an EF1α promoter. In some cases, the cassette is operably linked to an H1 promoter. In some cases, the recombinant expression vector comprises a 5′ AAV ITR sequence and a 3′ AAV ITR sequence. In some cases, the AAV ITRs are AAV9 ITRs. In some cases, the AAV ITRs are AAV2 ITRs.
64) In some cases, a recombinant expression vector comprises a cassette that comprises the nucleotide sequence: tgcacacctcctggcgggcagctctgCTGCTGCTACAAATGCTGCTGtgttctggcaatacctgCAGCAGCAAAA GAAGCAGCAGCAgggaggcctgccctgactgcccacTTTTTG (SEQ ID NO:642; “CUG_9244” in Table 7; FIG. 23). In some cases, the cassette does not include the 3′ TTTTTG sequence. In some cases, the cassette includes the nucleotide sequence Tₙ, where n is an integer from 5 to 10 (e.g., n is 5, 6, 7, 8, 9, or 10), in place of the 3′ TTTTTG sequence. In some cases, the cassette is operably linked to a promoter that is functional in a eukaryotic cell. In some cases, the cassette is operably linked to an RNA polymerase II promoter. In some cases, the cassette is operably linked to an RNA polymerase III promoter. In some cases, the cassette is operably linked to a CAG promoter. In some cases, the cassette is operably linked to a CBA promoter. In some cases, the cassette is operably linked to a CMV promoter. In some cases, the cassette is operably linked to a U6 promoter. In some cases, the cassette is operably linked to an EF1α promoter. In some cases, the cassette is operably linked to an H1 promoter. In some cases, the recombinant expression vector comprises a 5′ AAV ITR sequence and a 3′ AAV ITR sequence. In some cases, the AAV ITRs are AAV9 ITRs. In some cases, the AAV ITRs are AAV2 ITRs.
65) In some cases, a recombinant expression vector comprises a cassette that comprises the nucleotide sequence: tgcacacctcctggcgggcagctctgCTGCTGCTACAACAGCTGCTGtgttctggcaatacctgCAGCAGCAGAA GAAGCAGCAGCAgggaggcctgccctgactgcccacTTTTTG (SEQ ID NO:643; “CUG_9325” in Table 7; FIG. 23). In some cases, the cassette does not include the 3′ TTTTTG sequence. In some cases, the cassette includes the nucleotide sequence Tₙ, where n is an integer from 5 to 10 (e.g., n is 5, 6, 7, 8, 9, or 10), in place of the 3′ TTTTTG sequence. In some cases, the cassette is operably linked to a promoter that is functional in a eukaryotic cell. In some cases, the cassette is operably linked to an RNA polymerase II promoter. In some cases, the cassette is operably linked to an RNA polymerase III promoter. In some cases, the cassette is operably linked to a CAG promoter. In some cases, the cassette is operably linked to a CBA promoter. In some cases, the cassette is operably linked to a CMV promoter. In some cases, the cassette is operably linked to a U6 promoter. In some cases, the cassette is operably linked to an EF1α promoter. In some cases, the cassette is operably linked to an H1 promoter. In some cases, the recombinant expression vector comprises a 5′ AAV ITR sequence and a 3′ AAV ITR sequence. In some cases, the AAV ITRs are AAV9 ITRs. In some cases, the AAV ITRs are AAV2 ITRs.
66) In some cases, a recombinant expression vector comprises a cassette that comprises the nucleotide sequence: tgcacacctcctggcgggcagctctgCTGCTGCTACAACTACTGCTGtgttctggcaatacctgCAGCAGAAGAA GAAGCAGCAGCAgggaggcctgccctgactgcccacTTTTTG (SEQ ID NO:644; “CUG_9406” in Table 7; FIG. 23). In some cases, the cassette does not include the 3′ TTTTTG sequence. In some cases, the cassette includes the nucleotide sequence Tₙ, where n is an integer from 5 to 10 (e.g., n is 5, 6, 7, 8, 9, or 10), in place of the 3′ TTTTTG sequence. In some cases, the cassette is operably linked to a promoter that is functional in a eukaryotic cell. In some cases, the cassette is operably linked to an RNA polymerase II promoter. In some cases, the cassette is operably linked to an RNA polymerase III promoter. In some cases, the cassette is operably linked to a CAG promoter. In some cases, the cassette is operably linked to a CBA promoter. In some cases, the cassette is operably linked to a CMV promoter. In some cases, the cassette is operably linked to a U6 promoter. In some cases, the cassette is operably linked to an EF1α promoter. In some cases, the cassette is operably linked to an H1 promoter. In some cases, the recombinant expression vector comprises a 5′ AAV ITR sequence and a 3′ AAV ITR sequence. In some cases, the AAV ITRs are AAV9 ITRs. In some cases, the AAV ITRs are AAV2 ITRs.
67) In some cases, a recombinant expression vector comprises a cassette that comprises the nucleotide sequence: tgcacacctcctggcgggcagctctgCTGCTGCTACAACTGATGCTGtgttctggcaatacctgCAGCAACAGAA GAAGCAGCAGCAgggaggcctgccctgactgcccacTTTTTG (SEQ ID NO:645; “CUG_9487” in Table 7; FIG. 23). In some cases, the cassette does not include the 3′ TTTTTG sequence. In some cases, the cassette includes the nucleotide sequence Tₙ, where n is an integer from 5 to 10 (e.g., n is 5, 6, 7, 8, 9, or 10), in place of the 3′ TTTTTG sequence. In some cases, the cassette is operably linked to a promoter that is functional in a eukaryotic cell. In some cases, the cassette is operably linked to an RNA polymerase II promoter. In some cases, the cassette is operably linked to an RNA polymerase III promoter. In some cases, the cassette is operably linked to a CAG promoter. In some cases, the cassette is operably linked to a CBA promoter. In some cases, the cassette is operably linked to a CMV promoter. In some cases, the cassette is operably linked to a U6 promoter. In some cases, the cassette is operably linked to an EF1α promoter. In some cases, the cassette is operably linked to an H1 promoter. In some cases, the recombinant expression vector comprises a 5′ AAV ITR sequence and a 3′ AAV ITR sequence. In some cases, the AAV ITRs are AAV9 ITRs. In some cases, the AAV ITRs are AAV2 ITRs.
68) In some cases, a recombinant expression vector comprises a cassette that comprises the nucleotide sequence: tgcacacctcctggcgggcagctctgCTGCTGCTACAGATACTGCTGtgttctggcaatacctgCAGCAGAAACA GAAGCAGCAGCAgggaggcctgccctgactgcccacTTTTTG (SEQ ID NO:646; “CUG_10054” in Table 7; FIG. 23). In some cases, the cassette does not include the 3′ TTTTTG sequence. In some cases, the cassette includes the nucleotide sequence Tₙ, where n is an integer from 5 to 10 (e.g., n is 5, 6, 7, 8, 9, or 10), in place of the 3′ TTTTTG sequence. In some cases, the cassette is operably linked to a promoter that is functional in a eukaryotic cell. In some cases, the cassette is operably linked to an RNA polymerase II promoter. In some cases, the cassette is operably linked to an RNA polymerase III promoter. In some cases, the cassette is operably linked to a CAG promoter. In some cases, the cassette is operably linked to a CBA promoter. In some cases, the cassette is operably linked to a CMV promoter. In some cases, the cassette is operably linked to a U6 promoter. In some cases, the cassette is operably linked to an EF1α promoter. In some cases, the cassette is operably linked to an H1 promoter. In some cases, the recombinant expression vector comprises a 5′ AAV ITR sequence and a 3′ AAV ITR sequence. In some cases, the AAV ITRs are AAV9 ITRs. In some cases, the AAV ITRs are AAV2 ITRs.
69) In some cases, a recombinant expression vector comprises a cassette that comprises the nucleotide sequence: tgcacacctcctggcgggcagctctgCTGCTGCTACAGCAACTGCTGtgttctggcaatacctgCAGCAGAAGCA GAAGCAGCAGCAgggaggcctgccctgactgcccacTTTTTG (SEQ ID NO:647; “CUG_10621” in Table 7; FIG. 23). In some cases, the cassette does not include the 3′ TTTTTG sequence. In some cases, the cassette includes the nucleotide sequence Tₙ, where n is an integer from 5 to 10 (e.g., n is 5, 6, 7, 8, 9, or 10), in place of the 3′ TTTTTG sequence. In some cases, the cassette is operably linked to a promoter that is functional in a eukaryotic cell. In some cases, the cassette is operably linked to an RNA polymerase II promoter. In some cases, the cassette is operably linked to an RNA polymerase III promoter. In some cases, the cassette is operably linked to a CAG promoter. In some cases, the cassette is operably linked to a CBA promoter. In some cases, the cassette is operably linked to a CMV promoter. In some cases, the cassette is operably linked to a U6 promoter. In some cases, the cassette is operably linked to an EF1α promoter. In some cases, the cassette is operably linked to an H1 promoter. In some cases, the recombinant expression vector comprises a 5′ AAV ITR sequence and a 3′ AAV ITR sequence. In some cases, the AAV ITRs are AAV9 ITRs. In some cases, the AAV ITRs are AAV2 ITRs.
70) In some cases, a recombinant expression vector comprises a cassette that comprises the nucleotide sequence: tgcacacctcctggcgggcagctctgCTGCTGCTACAGCTAATGCTGtgttctggcaatacctgCAGCAAAAGCA GAAGCAGCAGCAgggaggcctgccctgactgcccacTTTTTG (SEQ ID NO:648; “CUG_11188” in Table 7; FIG. 23). In some cases, the cassette does not include the 3′ TTTTTG sequence. In some cases, the cassette includes the nucleotide sequence Tₙ, where n is an integer from 5 to 10 (e.g., n is 5, 6, 7, 8, 9, or 10), in place of the 3′ TTTTTG sequence. In some cases, the cassette is operably linked to a promoter that is functional in a eukaryotic cell. In some cases, the cassette is operably linked to an RNA polymerase II promoter. In some cases, the cassette is operably linked to an RNA polymerase III promoter. In some cases, the cassette is operably linked to a CAG promoter. In some cases, the cassette is operably linked to a CBA promoter. In some cases, the cassette is operably linked to a CMV promoter. In some cases, the cassette is operably linked to a U6 promoter. In some cases, the cassette is operably linked to an EF1α promoter. In some cases, the cassette is operably linked to an H1 promoter. In some cases, the recombinant expression vector comprises a 5′ AAV ITR sequence and a 3′ AAV ITR sequence. In some cases, the AAV ITRs are AAV9 ITRs. In some cases, the AAV ITRs are AAV2 ITRs.
71) In some cases, a recombinant expression vector comprises a cassette that comprises the nucleotide sequence: tgcacacctcctggcgggcagctctgCTGCTGCTGAAAATGCTGCTGtgttctggcaatacctgCAGCAGCAAAA ACAGCAGCAGCAgggaggcctgccctgactgcccacTTTTTG (SEQ ID NO:649; “CUG_222609” in Table 7; FIG. 23). In some cases, the cassette does not include the 3′ TTTTTG sequence. In some cases, the cassette includes the nucleotide sequence Tₙ, where n is an integer from 5 to 10 (e.g., n is 5, 6, 7, 8, 9, or 10), in place of the 3′ TTTTTG sequence. In some cases, the cassette is operably linked to a promoter that is functional in a eukaryotic cell. In some cases, the cassette is operably linked to an RNA polymerase II promoter. In some cases, the cassette is operably linked to an RNA polymerase III promoter. In some cases, the cassette is operably linked to a CAG promoter. In some cases, the cassette is operably linked to a CBA promoter. In some cases, the cassette is operably linked to a CMV promoter. In some cases, the cassette is operably linked to a U6 promoter. In some cases, the cassette is operably linked to an EF1α promoter. In some cases, the cassette is operably linked to an H1 promoter. In some cases, the recombinant expression vector comprises a 5′ AAV ITR sequence and a 3′ AAV ITR sequence. In some cases, the AAV ITRs are AAV9 ITRs. In some cases, the AAV ITRs are AAV2 ITRs.
72) In some cases, a recombinant expression vector comprises a cassette that comprises the nucleotide sequence: tgcacacctcctggcgggcagctctgCTGCTGCTGAAACAGCTGCTGtgttctggcaatacctgCAGCAGCAGAA ACAGCAGCAGCAgggaggcctgccctgactgcccacTTTTTG (SEQ ID NO:650; “CUG_22690” in Table 7; FIG. 23). In some cases, the cassette does not include the 3′ TTTTTG sequence. In some cases, the cassette includes the nucleotide sequence Tₙ, where n is an integer from 5 to 10 (e.g., n is 5, 6, 7, 8, 9, or 10), in place of the 3′ TTTTTG sequence. In some cases, the cassette is operably linked to a promoter that is functional in a eukaryotic cell. In some cases, the cassette is operably linked to an RNA polymerase II promoter. In some cases, the cassette is operably linked to an RNA polymerase III promoter. In some cases, the cassette is operably linked to a CAG promoter. In some cases, the cassette is operably linked to a CBA promoter. In some cases, the cassette is operably linked to a CMV promoter. In some cases, the cassette is operably linked to a U6 promoter. In some cases, the cassette is operably linked to an EF1α promoter. In some cases, the cassette is operably linked to an H1 promoter. In some cases, the recombinant expression vector comprises a 5′ AAV ITR sequence and a 3′ AAV ITR sequence. In some cases, the AAV ITRs are AAV9 ITRs. In some cases, the AAV ITRs are AAV2 ITRs.
73) In some cases, a recombinant expression vector comprises a cassette that comprises the nucleotide sequence: tgcacacctcctggcgggcagctctgCTGCTGCTGAAACTACTGCTGtgttctggcaatacctgCAGCAGAAGAA ACAGCAGCAGCAgggaggcctgccctgactgcccacTTTTTG (SEQ ID NO:651; “CUG_22771” in Table 7; FIG. 23). In some cases, the cassette does not include the 3′ TTTTTG sequence. In some cases, the cassette includes the nucleotide sequence Tₙ, where n is an integer from 5 to 10 (e.g., n is 5, 6, 7, 8, 9, or 10), in place of the 3′ TTTTTG sequence. In some cases, the cassette is operably linked to a promoter that is functional in a eukaryotic cell. In some cases, the cassette is operably linked to an RNA polymerase II promoter. In some cases, the cassette is operably linked to an RNA polymerase III promoter. In some cases, the cassette is operably linked to a CAG promoter. In some cases, the cassette is operably linked to a CBA promoter. In some cases, the cassette is operably linked to a CMV promoter. In some cases, the cassette is operably linked to a U6 promoter. In some cases, the cassette is operably linked to an EF1α promoter. In some cases, the cassette is operably linked to an H1 promoter. In some cases, the recombinant expression vector comprises a 5′ AAV ITR sequence and a 3′ AAV ITR sequence. In some cases, the AAV ITRs are AAV9 ITRs. In some cases, the AAV ITRs are AAV2 ITRs.
74) In some cases, a recombinant expression vector comprises a cassette that comprises the nucleotide sequence: tgcacacctcctggcgggcagctctgCTGCTGCTGAAACTGATGCTGtgttctggcaatacctgCAGCAACAGAA ACAGCAGCAGCAgggaggcctgccctgactgcccacTTTTTG (SEQ ID NO:652; “CUG_22852” in Table 7; FIG. 23). In some cases, the cassette does not include the 3′ TTTTTG sequence. In some cases, the cassette includes the nucleotide sequence Tₙ, where n is an integer from 5 to 10 (e.g., n is 5, 6, 7, 8, 9, or 10), in place of the 3′ TTTTTG sequence. In some cases, the cassette is operably linked to a promoter that is functional in a eukaryotic cell. In some cases, the cassette is operably linked to an RNA polymerase II promoter. In some cases, the cassette is operably linked to an RNA polymerase III promoter. In some cases, the cassette is operably linked to a CAG promoter. In some cases, the cassette is operably linked to a CBA promoter. In some cases, the cassette is operably linked to a CMV promoter. In some cases, the cassette is operably linked to a U6 promoter. In some cases, the cassette is operably linked to an EF1α promoter. In some cases, the cassette is operably linked to an H1 promoter. In some cases, the recombinant expression vector comprises a 5′ AAV ITR sequence and a 3′ AAV ITR sequence. In some cases, the AAV ITRs are AAV9 ITRs. In some cases, the AAV ITRs are AAV2 ITRs.
75) In some cases, a recombinant expression vector comprises a cassette that comprises the nucleotide sequence: tgcacacctcctggcgggcagctctgCTGCTGCTGAAGAAGCTGCTGtgttctggcaatacctgCAGCAGCAACA ACAGCAGCAGCAgggaggcctgccctgactgcccacTTTTTG (SEQ ID NO:653; “CUG_233338” in Table 7; FIG. 23). In some cases, the cassette does not include the 3′ TTTTTG sequence. In some cases, the cassette includes the nucleotide sequence Tₙ, where n is an integer from 5 to 10 (e.g., n is 5, 6, 7, 8, 9, or 10), in place of the 3′ TTTTTG sequence. In some cases, the cassette is operably linked to a promoter that is functional in a eukaryotic cell. In some cases, the cassette is operably linked to an RNA polymerase II promoter. In some cases, the cassette is operably linked to an RNA polymerase III promoter. In some cases, the cassette is operably linked to a CAG promoter. In some cases, the cassette is operably linked to a CBA promoter. In some cases, the cassette is operably linked to a CMV promoter. In some cases, the cassette is operably linked to a U6 promoter. In some cases, the cassette is operably linked to an EF1α promoter. In some cases, the cassette is operably linked to an H1 promoter. In some cases, the recombinant expression vector comprises a 5′ AAV ITR sequence and a 3′ AAV ITR sequence. In some cases, the AAV ITRs are AAV9 ITRs. In some cases, the AAV ITRs are AAV2 ITRs.
76) In some cases, a recombinant expression vector comprises a cassette that comprises the nucleotide sequence: tgcacacctcctggcgggcagctctgCTGCTGCTGAAGATGATGCTGtgttctggcaatacctgCAGCAACAACA ACAGCAGCAGCAgggaggcctgccctgactgcccacTTTTTG (SEQ ID NO:654; “CUG_23500” in Table 7; FIG. 23). In some cases, the cassette does not include the 3′ TTTTTG sequence. In some cases, the cassette includes the nucleotide sequence Tₙ, where n is an integer from 5 to 10 (e.g., n is 5, 6, 7, 8, 9, or 10), in place of the 3′ TTTTTG sequence. In some cases, the cassette is operably linked to a promoter that is functional in a eukaryotic cell. In some cases, the cassette is operably linked to an RNA polymerase II promoter. In some cases, the cassette is operably linked to an RNA polymerase III promoter. In some cases, the cassette is operably linked to a CAG promoter. In some cases, the cassette is operably linked to a CBA promoter. In some cases, the cassette is operably linked to a CMV promoter. In some cases, the cassette is operably linked to a U6 promoter. In some cases, the cassette is operably linked to an EF1α promoter. In some cases, the cassette is operably linked to an H1 promoter. In some cases, the recombinant expression vector comprises a 5′ AAV ITR sequence and a 3′ AAV ITR sequence. In some cases, the AAV ITRs are AAV9 ITRs. In some cases, the AAV ITRs are AAV2 ITRs.
77) In some cases, a recombinant expression vector comprises a cassette that comprises the nucleotide sequence: tgcacacctcctggcgggcagctctgCTGCTGCTGAAGCAGATGCTGtgttctggcaatacctgCAGCAACAGCA ACAGCAGCAGCAgggaggcctgccctgactgcccacTTTTTG (SEQ ID NO:655; “CUG_24067” in Table 7; FIG. 23). In some cases, the cassette does not include the 3′ TTTTTG sequence. In some cases, the cassette includes the nucleotide sequence Tₙ, where n is an integer from 5 to 10 (e.g., n is 5, 6, 7, 8, 9, or 10), in place of the 3′ TTTTTG sequence. In some cases, the cassette is operably linked to a promoter that is functional in a eukaryotic cell. In some cases, the cassette is operably linked to an RNA polymerase II promoter. In some cases, the cassette is operably linked to an RNA polymerase III promoter. In some cases, the cassette is operably linked to a CAG promoter. In some cases, the cassette is operably linked to a CBA promoter. In some cases, the cassette is operably linked to a CMV promoter. In some cases, the cassette is operably linked to a U6 promoter. In some cases, the cassette is operably linked to an EF1α promoter. In some cases, the cassette is operably linked to an H1 promoter. In some cases, the recombinant expression vector comprises a 5′ AAV ITR sequence and a 3′ AAV ITR sequence. In some cases, the AAV ITRs are AAV9 ITRs. In some cases, the AAV ITRs are AAV2 ITRs.
78) In some cases, a recombinant expression vector comprises a cassette that comprises the nucleotide sequence: tgcacacctcctggcgggcagctctgCTGCTGCTGAAGCTAATGCTGtgttctggcaatacctgCAGCAAAAGCA ACAGCAGCAGCAgggaggcctgccctgactgcccacTTTTTG (SEQ ID NO:656; “CUG_24553” in Table 7; FIG. 23). In some cases, the cassette does not include the 3′ TTTTTG sequence. In some cases, the cassette includes the nucleotide sequence Tₙ, where n is an integer from 5 to 10 (e.g., n is 5, 6, 7, 8, 9, or 10), in place of the 3′ TTTTTG sequence. In some cases, the cassette is operably linked to a promoter that is functional in a eukaryotic cell. In some cases, the cassette is operably linked to an RNA polymerase II promoter. In some cases, the cassette is operably linked to an RNA polymerase III promoter. In some cases, the cassette is operably linked to a CAG promoter. In some cases, the cassette is operably linked to a CBA promoter. In some cases, the cassette is operably linked to a CMV promoter. In some cases, the cassette is operably linked to a U6 promoter. In some cases, the cassette is operably linked to an EF1α promoter. In some cases, the cassette is operably linked to an H1 promoter. In some cases, the recombinant expression vector comprises a 5′ AAV ITR sequence and a 3′ AAV ITR sequence. In some cases, the AAV ITRs are AAV9 ITRs. In some cases, the AAV ITRs are AAV2 ITRs.

[0214] The following are further non-limiting examples of recombinant expression vectors comprising a cassette of the present disclosure.

1) In some cases, a recombinant expression vector comprises one of the following cassettes. In some cases, a cassette comprises, in order from 5′ to 3′: i) SEQ ID NO:854; ii) SEQ ID NO:379; iii) a sequence that is complementary to SEQ ID NO: 379, where the sequence can comprise from 0 to 10 mismatches (non-complementary nucleotides) to SEQ ID NO: 379; and iv) SEQ ID NO:855. In some cases, a cassette comprises, in order from 5′ to 3′: i) SEQ ID NO:856; ii) SEQ ID NO: 379; iii) a sequence that is complementary to SEQ ID NO: 379, where the sequence can comprise from 0 to 10 mismatches (non-complementary nucleotides) to SEQ ID NO: 379; and iv) SEQ ID NO:857. In some cases, a cassette comprises, in order from 5′ to 3′: i) SEQ ID NO:858; ii) SEQ ID NO: 379; iii) a sequence that is complementary to SEQ ID NO: 379, where the sequence can comprise from 0 to 10 mismatches (non-complementary nucleotides) to SEQ ID NO: 379; and iv) SEQ ID NO:859. In some cases, the cassette is operably linked to a promoter that is functional in a eukaryotic cell. In some cases, the cassette is operably linked to an RNA polymerase II promoter. In some cases, the cassette is operably linked to an RNA polymerase III promoter. In some cases, the cassette is operably linked to a CAG promoter. In some cases, the cassette is operably linked to a CBA promoter. In some cases, the cassette is operably linked to a CMV promoter. In some cases, the cassette is operably linked to a U6 promoter. In some cases, the cassette is operably linked to an EF1α promoter. In some cases, the cassette is operably linked to an H1 promoter. In some cases, the recombinant expression vector comprises a 5′ AAV ITR sequence and a 3′ AAV ITR sequence. In some cases, the AAV ITRs are AAV9 ITRs. In some cases, the AAV ITRs are AAV2 ITRs.
2) In some cases, a recombinant expression vector comprises one of the following cassettes. In some cases, a cassette comprises, in order from 5′ to 3′: i) SEQ ID NO:854; ii) SEQ ID NO:380; iii) a sequence that is complementary to SEQ ID NO: 380, where the sequence can comprise from 0 to 10 mismatches (non-complementary nucleotides) to SEQ ID NO: 380; and iv) SEQ ID NO:855. In some cases, a cassette comprises, in order from 5′ to 3′: i) SEQ ID NO:856; ii) SEQ ID NO: 380; iii) a sequence that is complementary to SEQ ID NO: 380, where the sequence can comprise from 0 to 10 mismatches (non-complementary nucleotides) to SEQ ID NO: 380; and iv) SEQ ID NO:857. In some cases, a cassette comprises, in order from 5′ to 3′: i) SEQ ID NO:858; ii) SEQ ID NO: 380; iii) a sequence that is complementary to SEQ ID NO: 380, where the sequence can comprise from 0 to 10 mismatches (non-complementary nucleotides) to SEQ ID NO: 380; and iv) SEQ ID NO:859. In some cases, the cassette is operably linked to a promoter that is functional in a eukaryotic cell. In some cases, the cassette is operably linked to an RNA polymerase II promoter. In some cases, the cassette is operably linked to an RNA polymerase III promoter. In some cases, the cassette is operably linked to a CAG promoter. In some cases, the cassette is operably linked to a CBA promoter. In some cases, the cassette is operably linked to a CMV promoter. In some cases, the cassette is operably linked to a U6 promoter. In some cases, the cassette is operably linked to an EF1α promoter. In some cases, the cassette is operably linked to an H1 promoter. In some cases, the recombinant expression vector comprises a 5′ AAV ITR sequence and a 3′ AAV ITR sequence. In some cases, the AAV ITRs are AAV9 ITRs. In some cases, the AAV ITRs are AAV2 ITRs.
3) In some cases, a recombinant expression vector comprises one of the following cassettes. In some cases, a cassette comprises, in order from 5′ to 3′: i) SEQ ID NO:854; ii) SEQ ID NO:381; iii) a sequence that is complementary to SEQ ID NO: 381, where the sequence can comprise from 0 to 10 mismatches (non-complementary nucleotides) to SEQ ID NO: 381; and iv) SEQ ID NO:855. In some cases, a cassette comprises, in order from 5′ to 3′: i) SEQ ID NO:856; ii) SEQ ID NO: 381; iii) a sequence that is complementary to SEQ ID NO: 381, where the sequence can comprise from 0 to 10 mismatches (non-complementary nucleotides) to SEQ ID NO: 381; and iv) SEQ ID NO:857. In some cases, a cassette comprises, in order from 5′ to 3′: i) SEQ ID NO:858; ii) SEQ ID NO: 381; iii) a sequence that is complementary to SEQ ID NO: 381, where the sequence can comprise from 0 to 10 mismatches (non-complementary nucleotides) to SEQ ID NO: 381; and iv) SEQ ID NO:859. In some cases, the cassette is operably linked to a promoter that is functional in a eukaryotic cell. In some cases, the cassette is operably linked to an RNA polymerase II promoter. In some cases, the cassette is operably linked to an RNA polymerase III promoter. In some cases, the cassette is operably linked to a CAG promoter. In some cases, the cassette is operably linked to a CBA promoter. In some cases, the cassette is operably linked to a CMV promoter. In some cases, the cassette is operably linked to a U6 promoter. In some cases, the cassette is operably linked to an EF1α promoter. In some cases, the cassette is operably linked to an H1 promoter. In some cases, the recombinant expression vector comprises a 5′ AAV ITR sequence and a 3′ AAV ITR sequence. In some cases, the AAV ITRs are AAV9 ITRs. In some cases, the AAV ITRs are AAV2 ITRs.
4) In some cases, a recombinant expression vector comprises one of the following cassettes. In some cases, a cassette comprises, in order from 5′ to 3′: i) SEQ ID NO:854; ii) SEQ ID NO:382; iii) a sequence that is complementary to SEQ ID NO: 382, where the sequence can comprise from 0 to 10 mismatches (non-complementary nucleotides) to SEQ ID NO: 382; and iv) SEQ ID NO:855. In some cases, a cassette comprises, in order from 5′ to 3′: i) SEQ ID NO:856; ii) SEQ ID NO: 382; iii) a sequence that is complementary to SEQ ID NO: 382, where the sequence can comprise from 0 to 10 mismatches (non-complementary nucleotides) to SEQ ID NO: 382; and iv) SEQ ID NO:857. In some cases, a cassette comprises, in order from 5′ to 3′: i) SEQ ID NO:858; ii) SEQ ID NO: 382; iii) a sequence that is complementary to SEQ ID NO: 382, where the sequence can comprise from 0 to 10 mismatches (non-complementary nucleotides) to SEQ ID NO: 382; and iv) SEQ ID NO:859. In some cases, the cassette is operably linked to a promoter that is functional in a eukaryotic cell. In some cases, the cassette is operably linked to an RNA polymerase II promoter. In some cases, the cassette is operably linked to an RNA polymerase III promoter. In some cases, the cassette is operably linked to a CAG promoter. In some cases, the cassette is operably linked to a CBA promoter. In some cases, the cassette is operably linked to a CMV promoter. In some cases, the cassette is operably linked to a U6 promoter. In some cases, the cassette is operably linked to an EF1a promoter. In some cases, the cassette is operably linked to an H1 promoter. In some cases, the recombinant expression vector comprises a 5′ AAV ITR sequence and a 3′ AAV ITR sequence. In some cases, the AAV ITRs are AAV9 ITRs. In some cases, the AAV ITRs are AAV2 ITRs.
5) In some cases, a recombinant expression vector comprises one of the following cassettes. In some cases, a cassette comprises, in order from 5′ to 3′: i) SEQ ID NO:854; ii) SEQ ID NO:383; iii) a sequence that is complementary to SEQ ID NO: 383, where the sequence can comprise from 0 to 10 mismatches (non-complementary nucleotides) to SEQ ID NO: 383; and iv) SEQ ID NO:855. In some cases, a cassette comprises, in order from 5′ to 3′: i) SEQ ID NO:856; ii) SEQ ID NO: 383; iii) a sequence that is complementary to SEQ ID NO: 383, where the sequence can comprise from 0 to 10 mismatches (non-complementary nucleotides) to SEQ ID NO: 383; and iv) SEQ ID NO: 857. In some cases, a cassette comprises, in order from 5′ to 3′: i) SEQ ID NO:858; ii) SEQ ID NO: 383; iii) a sequence that is complementary to SEQ ID NO: 383, where the sequence can comprise from 0 to 10 mismatches (non-complementary nucleotides) to SEQ ID NO: 383; and iv) SEQ ID NO:859. In some cases, the cassette is operably linked to a promoter that is functional in a eukaryotic cell. In some cases, the cassette is operably linked to an RNA polymerase II promoter. In some cases, the cassette is operably linked to an RNA polymerase III promoter. In some cases, the cassette is operably linked to a CAG promoter. In some cases, the cassette is operably linked to a CBA promoter. In some cases, the cassette is operably linked to a CMV promoter. In some cases, the cassette is operably linked to a U6 promoter. In some cases, the cassette is operably linked to an EF1α promoter. In some cases, the cassette is operably linked to an H1 promoter. In some cases, the recombinant expression vector comprises a 5′ AAV ITR sequence and a 3′ AAV ITR sequence. In some cases, the AAV ITRs are AAV9 ITRs. In some cases, the AAV ITRs are AAV2 ITRs.
6) In some cases, a recombinant expression vector comprises one of the following cassettes. In some cases, a cassette comprises, in order from 5′ to 3′: i) SEQ ID NO:854; ii) SEQ ID NO:384; iii) a sequence that is complementary to SEQ ID NO: 384, where the sequence can comprise from 0 to 10 mismatches (non-complementary nucleotides) to SEQ ID NO: 384; and iv) SEQ ID NO:855. In some cases, a cassette comprises, in order from 5′ to 3′: i) SEQ ID NO:856; ii) SEQ ID NO: 384; iii) a sequence that is complementary to SEQ ID NO: 384, where the sequence can comprise from 0 to 10 mismatches (non-complementary nucleotides) to SEQ ID NO: 384; and iv) SEQ ID NO:857. In some cases, a cassette comprises, in order from 5′ to 3′: i) SEQ ID NO:858; ii) SEQ ID NO: 384; iii) a sequence that is complementary to SEQ ID NO: 384, where the sequence can comprise from 0 to 10 mismatches (non-complementary nucleotides) to SEQ ID NO: 384; and iv) SEQ ID NO:859. In some cases, the cassette is operably linked to a promoter that is functional in a eukaryotic cell. In some cases, the cassette is operably linked to an RNA polymerase II promoter. In some cases, the cassette is operably linked to an RNA polymerase III promoter. In some cases, the cassette is operably linked to a CAG promoter. In some cases, the cassette is operably linked to a CBA promoter. In some cases, the cassette is operably linked to a CMV promoter. In some cases, the cassette is operably linked to a U6 promoter. In some cases, the cassette is operably linked to an EF1α promoter. In some cases, the cassette is operably linked to an H1 promoter. In some cases, the recombinant expression vector comprises a 5′ AAV ITR sequence and a 3′ AAV ITR sequence. In some cases, the AAV ITRs are AAV9 ITRs. In some cases, the AAV ITRs are AAV2 ITRs.
7) In some cases, a recombinant expression vector comprises one of the following cassettes. In some cases, a cassette comprises, in order from 5′ to 3′: i) SEQ ID NO:854; ii) SEQ ID NO:385; iii) a sequence that is complementary to SEQ ID NO: 385, where the sequence can comprise from 0 to 10 mismatches (non-complementary nucleotides) to SEQ ID NO: 385; and iv) SEQ ID NO:855. In some cases, a cassette comprises, in order from 5′ to 3′: i) SEQ ID NO:856; ii) SEQ ID NO: 385; iii) a sequence that is complementary to SEQ ID NO: 385, where the sequence can comprise from 0 to 10 mismatches (non-complementary nucleotides) to SEQ ID NO: 385; and iv) SEQ ID NO:857. In some cases, a cassette comprises, in order from 5′ to 3′: i) SEQ ID NO:858; ii) SEQ ID NO: 385; iii) a sequence that is complementary to SEQ ID NO: 385, where the sequence can comprise from 0 to 10 mismatches (non-complementary nucleotides) to SEQ ID NO: 385; and iv) recombinant expression vector comprises a 5′ AAV ITR sequence and a 3′ AAV ITR sequence. In some cases, the AAV ITRs are AAV9 ITRs. In some cases, the AAV ITRs are AAV2 ITRs.
8) In some cases, a recombinant expression vector comprises one of the following cassettes. In some cases, a cassette comprises, in order from 5′ to 3′: i) SEQ ID NO:854; ii) SEQ ID NO:386; iii) a sequence that is complementary to SEQ ID NO: 386, where the sequence can comprise from 0 to 10 mismatches (non-complementary nucleotides) to SEQ ID NO: 386; and iv) SEQ ID NO:855. In some cases, a cassette comprises, in order from 5′ to 3′: i) SEQ ID NO:856; ii) SEQ ID NO: 386; iii) a sequence that is complementary to SEQ ID NO: 386, where the sequence can comprise from 0 to 10 mismatches (non-complementary nucleotides) to SEQ ID NO: 386; and iv) SEQ ID NO:857. In some cases, a cassette comprises, in order from 5′ to 3′: i) SEQ ID NO:858; ii) SEQ ID NO: 386; iii) a sequence that is complementary to SEQ ID NO: 386, where the sequence can comprise from 0 to 10 mismatches (non-complementary nucleotides) to SEQ ID NO: 386; and iv) SEQ ID NO:859. In some cases, the cassette is operably linked to a promoter that is functional in a eukaryotic cell. In some cases, the cassette is operably linked to an RNA polymerase II promoter. In some cases, the cassette is operably linked to an RNA polymerase III promoter. In some cases, the cassette is operably linked to a CAG promoter. In some cases, the cassette is operably linked to a CBA promoter. In some cases, the cassette is operably linked to a CMV promoter. In some cases, the cassette is operably linked to a U6 promoter. In some cases, the cassette is operably linked to an EF1α promoter. In some cases, the cassette is operably linked to an H1 promoter. In some cases, the recombinant expression vector comprises a 5′ AAV ITR sequence and a 3′ AAV ITR sequence. In some cases, the AAV ITRs are AAV9 ITRs. In some cases, the AAV ITRs are AAV2 ITRs.
9) In some cases, a recombinant expression vector comprises one of the following cassettes. In some cases, a cassette comprises, in order from 5′ to 3′: i) SEQ ID NO:854; ii) SEQ ID NO:387; iii) a sequence that is complementary to SEQ ID NO: 387, where the sequence can comprise from 0 to 10 mismatches (non-complementary nucleotides) to SEQ ID NO: 387; and iv) SEQ ID NO:855. In some cases, a cassette comprises, in order from 5′ to 3′: i) SEQ ID NO:856; ii) SEQ ID NO: 387; iii) a sequence that is complementary to SEQ ID NO: 387, where the sequence can comprise from 0 to 10 mismatches (non-complementary nucleotides) to SEQ ID NO: 387; and iv) SEQ ID NO:857. In some cases, a cassette comprises, in order from 5′ to 3′: i) SEQ ID NO:858; ii) SEQ ID NO: 387; iii) a sequence that is complementary to SEQ ID NO: 387, where the sequence can comprise from 0 to 10 mismatches (non-complementary nucleotides) to SEQ ID NO: 387; and iv) SEQ ID NO:859. In some cases, the cassette is operably linked to a promoter that is functional in a eukaryotic cell. In some cases, the cassette is operably linked to an RNA polymerase II promoter. In some cases, the cassette is operably linked to an RNA polymerase III promoter. In some cases, the cassette is operably linked to a CAG promoter. In some cases, the cassette is operably linked to a CBA promoter. In some cases, the cassette is operably linked to a CMV promoter. In some cases, the cassette is operably linked to a U6 promoter. In some cases, the cassette is operably linked to an EF1α promoter. In some cases, the cassette is operably linked to an H1 promoter. In some cases, the recombinant expression vector comprises a 5′ AAV ITR sequence and a 3′ AAV ITR sequence. In some cases, the AAV ITRs are AAV9 ITRs. In some cases, the AAV ITRs are AAV2 ITRs.
10) In some cases, a recombinant expression vector comprises one of the following cassettes. In some cases, a cassette comprises, in order from 5′ to 3′: i) SEQ ID NO:854; ii) SEQ ID NO:388; iii) a sequence that is complementary to SEQ ID NO: 388, where the sequence can comprise from 0 to 10 mismatches (non-complementary nucleotides) to SEQ ID NO: 388; and iv) SEQ ID NO:855. In some cases, a cassette comprises, in order from 5′ to 3′: i) SEQ ID NO:856; ii) SEQ ID NO: 388; iii) a sequence that is complementary to SEQ ID NO: 388, where the sequence can comprise from 0 to 10 mismatches (non-complementary nucleotides) to SEQ ID NO: 388; and iv) SEQ ID NO:857. In some cases, a cassette comprises, in order from 5′ to 3′: i) SEQ ID NO:858; ii) SEQ ID NO: 388; iii) a sequence that is complementary to SEQ ID NO: 388, where the sequence can comprise from 0 to 10 mismatches (non-complementary nucleotides) to SEQ ID NO: 388; and iv) SEQ ID NO:859. In some cases, the cassette is operably linked to a promoter that is functional in a eukaryotic cell. In some cases, the cassette is operably linked to an RNA polymerase II promoter. In some cases, the cassette is operably linked to an RNA polymerase III promoter. In some cases, the cassette is operably linked to a CAG promoter. In some cases, the cassette is operably linked to a CBA promoter. In some cases, the cassette is operably linked to a CMV promoter. In some cases, the cassette is operably linked to a U6 promoter. In some cases, the cassette is operably linked to an EF1α promoter. In some cases, the cassette is operably linked to an H1 promoter. In some cases, the recombinant expression vector comprises a 5′ AAV ITR sequence and a 3′ AAV ITR sequence. In some cases, the AAV ITRs are AAV9 ITRs. In some cases, the AAV ITRs are AAV2 ITRs.
11) In some cases, a recombinant expression vector comprises one of the following cassettes. In some cases, a cassette comprises, in order from 5′ to 3′: i) SEQ ID NO:854; ii) SEQ ID NO:389; iii) a sequence that is complementary to SEQ ID NO: 389, where the sequence can comprise from 0 to 10 mismatches (non-complementary nucleotides) to SEQ ID NO: 389; and iv) SEQ ID NO:855. In some cases, a cassette comprises, in order from 5′ to 3′: i) SEQ ID NO:856; ii) SEQ ID NO: 389; iii) a sequence that is complementary to SEQ ID NO: 389, where the sequence can comprise from 0 to 10 mismatches (non-complementary nucleotides) to SEQ ID NO: 389; and iv) SEQ ID NO: 857. In some cases, a cassette comprises, in order from 5′ to 3′: i) SEQ ID NO:858; ii) SEQ ID NO: 389; iii) a sequence that is complementary to SEQ ID NO: 389, where the sequence can comprise from 0 to 10 mismatches (non-complementary nucleotides) to SEQ ID NO: 389; and iv) SEQ ID NO:859. In some cases, the cassette is operably linked to a promoter that is functional in a eukaryotic cell. In some cases, the cassette is operably linked to an RNA polymerase II promoter. In some cases, the cassette is operably linked to an RNA polymerase III promoter. In some cases, the cassette is operably linked to a CAG promoter. In some cases, the cassette is operably linked to a CBA promoter. In some cases, the cassette is operably linked to a CMV promoter. In some cases, the cassette is operably linked to a U6 promoter. In some cases, the cassette is operably linked to an EF1α promoter. In some cases, the cassette is operably linked to an H1 promoter. In some cases, the recombinant expression vector comprises a 5′ AAV ITR sequence and a 3′ AAV ITR sequence. In some cases, the AAV ITRs are AAV9 ITRs. In some cases, the AAV ITRs are AAV2 ITRs.
12) In some cases, a recombinant expression vector comprises one of the following cassettes. In some cases, a cassette comprises, in order from 5′ to 3′: i) SEQ ID NO:854; ii) SEQ ID NO:390; iii) a sequence that is complementary to SEQ ID NO: 390, where the sequence can comprise from 0 to 10 mismatches (non-complementary nucleotides) to SEQ ID NO: 390; and iv) SEQ ID NO:855. In some cases, a cassette comprises, in order from 5′ to 3′: i) SEQ ID NO:856; ii) SEQ ID NO: 390; iii) a sequence that is complementary to SEQ ID NO: 390, where the sequence can comprise from 0 to 10 mismatches (non-complementary nucleotides) to SEQ ID NO: 390; and iv) SEQ ID NO:857. In some cases, a cassette comprises, in order from 5′ to 3′: i) SEQ ID NO:858; ii) SEQ ID NO: 390; iii) a sequence that is complementary to SEQ ID NO: 309, where the sequence can comprise from 0 to 10 mismatches (non-complementary nucleotides) to SEQ ID NO: 390; and iv) SEQ ID NO:859. In some cases, the cassette is operably linked to a promoter that is functional in a eukaryotic cell. In some cases, the cassette is operably linked to an RNA polymerase II promoter. In some cases, the cassette is operably linked to an RNA polymerase III promoter. In some cases, the cassette is operably linked to a CAG promoter. In some cases, the cassette is operably linked to a CBA promoter. In some cases, the cassette is operably linked to a CMV promoter. In some cases, the cassette is operably linked to a U6 promoter. In some cases, the cassette is operably linked to an EF1α promoter. In some cases, the cassette is operably linked to an H1 promoter. In some cases, the recombinant expression vector comprises a 5′ AAV ITR sequence and a 3′ AAV ITR sequence. In some cases, the AAV ITRs are AAV9 ITRs. In some cases, the AAV ITRs are AAV2 ITRs.
13) In some cases, a recombinant expression vector comprises one of the following cassettes. In some cases, a cassette comprises, in order from 5′ to 3′: i) SEQ ID NO:854; ii) SEQ ID NO:391; iii) a sequence that is complementary to SEQ ID NO: 391, where the sequence can comprise from 0 to 10 mismatches (non-complementary nucleotides) to SEQ ID NO: 391; and iv) SEQ ID NO:855. In some cases, a cassette comprises, in order from 5′ to 3′: i) SEQ ID NO:856; ii) SEQ ID NO: 391; iii) a sequence that is complementary to SEQ ID NO: 391, where the sequence can comprise from 0 to 10 mismatches (non-complementary nucleotides) to SEQ ID NO: 391; and iv) SEQ ID NO:857. In some cases, a cassette comprises, in order from 5′ to 3′: i) SEQ ID NO:858; ii) SEQ ID NO: 391; iii) a sequence that is complementary to SEQ ID NO: 391, where the sequence can comprise from 0 to 10 mismatches (non-complementary nucleotides) to SEQ ID NO: 391; and iv) SEQ ID NO:859. In some cases, the cassette is operably linked to a promoter that is functional in a eukaryotic cell. In some cases, the cassette is operably linked to an RNA polymerase II promoter. In some cases, the cassette is operably linked to an RNA polymerase III promoter. In some cases, the cassette is operably linked to a CAG promoter. In some cases, the cassette is operably linked to a CBA promoter. In some cases, the cassette is operably linked to a CMV promoter. In some cases, the cassette is operably linked to a U6 promoter. In some cases, the cassette is operably linked to an EF1α promoter. In some cases, the cassette is operably linked to an H1 promoter. In some cases, the recombinant expression vector comprises a 5′ AAV ITR sequence and a 3′ AAV ITR sequence. In some cases, the AAV ITRs are AAV9 ITRs. In some cases, the AAV ITRs are AAV2 ITRs.
14) In some cases, a recombinant expression vector comprises one of the following cassettes. In some cases, a cassette comprises, in order from 5′ to 3′: i) SEQ ID NO:854; ii) SEQ ID NO:390; iii) a sequence that is complementary to SEQ ID NO: 390, where the sequence can comprise from 0 to 10 mismatches (non-complementary nucleotides) to SEQ ID NO: 390; and iv) SEQ ID NO:855. In some cases, a cassette comprises, in order from 5′ to 3′: i) SEQ ID NO:856; ii) SEQ ID NO: 390; iii) a sequence that is complementary to SEQ ID NO: 390, where the sequence can comprise from 0 to 10 mismatches (non-complementary nucleotides) to SEQ ID NO: 390; and iv) SEQ ID NO: 857. In some cases, a cassette comprises, in order from 5′ to 3′: i) SEQ ID NO:858; ii) SEQ ID NO: 390; iii) a sequence that is complementary to SEQ ID NO: 390, where the sequence can comprise from 0 to 10 mismatches (non-complementary nucleotides) to SEQ ID NO: 390; and iv) SEQ ID NO:859. In some cases, the cassette is operably linked to a promoter that is functional in a eukaryotic cell. In some cases, the cassette is operably linked to an RNA polymerase II promoter. In some cases, the cassette is operably linked to an RNA polymerase III promoter. In some cases, the cassette is operably linked to a CAG promoter. In some cases, the cassette is operably linked to a CBA promoter. In some cases, the cassette is operably linked to a CMV promoter. In some cases, the cassette is operably linked to a U6 promoter. In some cases, the cassette is operably linked to an EF1α promoter. In some cases, the cassette is operably linked to an H1 promoter. In some cases, the recombinant expression vector comprises a 5′ AAV ITR sequence and a 3′ AAV ITR sequence. In some cases, the AAV ITRs are AAV9 ITRs. In some cases, the AAV ITRs are AAV2 ITRs.
15) In some cases, a recombinant expression vector comprises one of the following cassettes. In some cases, a cassette comprises, in order from 5′ to 3′: i) SEQ ID NO:854; ii) SEQ ID NO: 391; iii) a sequence that is complementary to SEQ ID NO: 391, where the sequence can comprise from 0 to 10 mismatches (non-complementary nucleotides) to SEQ ID NO: 391; and iv) SEQ ID NO:855. In some cases, a cassette comprises, in order from 5′ to 3′: i) SEQ ID NO:856; ii) SEQ ID NO: 391; iii) a sequence that is complementary to SEQ ID NO: 391, where the sequence can comprise from 0 to 10 mismatches (non-complementary nucleotides) to SEQ ID NO: 391; and iv) SEQ ID NO: 857. In some cases, a cassette comprises, in order from 5′ to 3′: i) SEQ ID NO:858; ii) SEQ ID NO: 391; iii) a sequence that is complementary to SEQ ID NO: 391, where the sequence can comprise from 0 to 10 mismatches (non-complementary nucleotides) to SEQ ID NO: 391; and iv) SEQ ID NO:859. In some cases, the cassette is operably linked to a promoter that is functional in a eukaryotic cell. In some cases, the cassette is operably linked to an RNA polymerase II promoter. In some cases, the cassette is operably linked to an RNA polymerase III promoter. In some cases, the cassette is operably linked to a CAG promoter. In some cases, the cassette is operably linked to a CBA promoter. In some cases, the cassette is operably linked to a CMV promoter. In some cases, the cassette is operably linked to a U6 promoter. In some cases, the cassette is operably linked to an EF1α promoter. In some cases, the cassette is operably linked to an H1 promoter. In some cases, the recombinant expression vector comprises a 5′ AAV ITR sequence and a 3′ AAV ITR sequence. In some cases, the AAV ITRs are AAV9 ITRs. In some cases, the AAV ITRs are AAV2 ITRs.
16) In some cases, a recombinant expression vector comprises one of the following cassettes. In some cases, a cassette comprises, in order from 5′ to 3′: i) SEQ ID NO:854; ii) SEQ ID NO:392; iii) a sequence that is complementary to SEQ ID NO: 392, where the sequence can comprise from 0 to 10 mismatches (non-complementary nucleotides) to SEQ ID NO: 392; and iv) SEQ ID NO:855. In some cases, a cassette comprises, in order from 5′ to 3′: i) SEQ ID NO:856; ii) SEQ ID NO: 392; iii) a sequence that is complementary to SEQ ID NO: 392, where the sequence can comprise from 0 to 10 mismatches (non-complementary nucleotides) to SEQ ID NO: 392; and iv) SEQ ID NO: 857. In some cases, a cassette comprises, in order from 5′ to 3′: i) SEQ ID NO:858; ii) SEQ ID NO: 392; iii) a sequence that is complementary to SEQ ID NO: 392, where the sequence can comprise from 0 to 10 mismatches (non-complementary nucleotides) to SEQ ID NO: 392; and iv) SEQ ID NO:859. In some cases, the cassette is operably linked to a promoter that is functional in a eukaryotic cell. In some cases, the cassette is operably linked to an RNA polymerase II promoter. In some cases, the cassette is operably linked to an RNA polymerase III promoter. In some cases, the cassette is operably linked to a CAG promoter. In some cases, the cassette is operably linked to a CBA promoter. In some cases, the cassette is operably linked to a CMV promoter. In some cases, the cassette is operably linked to a U6 promoter. In some cases, the cassette is operably linked to an EF1α promoter. In some cases, the cassette is operably linked to an H1 promoter. In some cases, the recombinant expression vector comprises a 5′ AAV ITR sequence and a 3′ AAV ITR sequence. In some cases, the AAV ITRs are AAV9 ITRs. In some cases, the AAV ITRs are AAV2 ITRs.
17) In some cases, a recombinant expression vector comprises one of the following cassettes. In some cases, a cassette comprises, in order from 5′ to 3′: i) SEQ ID NO:854; ii) SEQ ID NO:393; iii) a sequence that is complementary to SEQ ID NO: 393, where the sequence can comprise from 0 to 10 mismatches (non-complementary nucleotides) to SEQ ID NO: 393; and iv) SEQ ID NO:855. In some cases, a cassette comprises, in order from 5′ to 3′: i) SEQ ID NO:856; ii) SEQ ID NO: 393; iii) a sequence that is complementary to SEQ ID NO: 393, where the sequence can comprise from 0 to 10 mismatches (non-complementary nucleotides) to SEQ ID NO: 393; and iv) SEQ ID NO: 857. In some cases, a cassette comprises, in order from 5′ to 3′: i) SEQ ID NO:858; ii) SEQ ID NO: 393; iii) a sequence that is complementary to SEQ ID NO: 393, where the sequence can comprise from 0 to 10 mismatches (non-complementary nucleotides) to SEQ ID NO: 393; and iv) SEQ ID NO:859. In some cases, the cassette is operably linked to a promoter that is functional in a eukaryotic cell. In some cases, the cassette is operably linked to an RNA polymerase II promoter. In some cases, the cassette is operably linked to an RNA polymerase III promoter. In some cases, the cassette is operably linked to a CAG promoter. In some cases, the cassette is operably linked to a CBA promoter. In some cases, the cassette is operably linked to a CMV promoter. In some cases, the cassette is operably linked to a U6 promoter. In some cases, the cassette is operably linked to an EF1α promoter. In some cases, the cassette is operably linked to an H1 promoter. In some cases, the recombinant expression vector comprises a 5′ AAV ITR sequence and a 3′ AAV ITR sequence. In some cases, the AAV ITRs are AAV9 ITRs. In some cases, the AAV ITRs are AAV2 ITRs.
18) In some cases, a recombinant expression vector comprises one of the following cassettes. In some cases, a cassette comprises, in order from 5′ to 3′: i) SEQ ID NO:854; ii) SEQ ID NO:394; iii) a sequence that is complementary to SEQ ID NO: 394, where the sequence can comprise from 0 to 10 mismatches (non-complementary nucleotides) to SEQ ID NO: 394; and iv) SEQ ID NO:855. In some cases, a cassette comprises, in order from 5′ to 3′: i) SEQ ID NO:856; ii) SEQ ID NO: 394; iii) a sequence that is complementary to SEQ ID NO: 394, where the sequence can comprise from 0 to 10 mismatches (non-complementary nucleotides) to SEQ ID NO: 394; and iv) SEQ ID NO: 857. In some cases, a cassette comprises, in order from 5′ to 3′: i) SEQ ID NO:858; ii) SEQ ID NO: 394; iii) a sequence that is complementary to SEQ ID NO: 394, where the sequence can comprise from 0 to 10 mismatches (non-complementary nucleotides) to SEQ ID NO: 394; and iv) SEQ ID NO:859. In some cases, the cassette is operably linked to a promoter that is functional in a eukaryotic cell. In some cases, the cassette is operably linked to an RNA polymerase II promoter. In some cases, the cassette is operably linked to an RNA polymerase III promoter. In some cases, the cassette is operably linked to a CAG promoter. In some cases, the cassette is operably linked to a CBA promoter. In some cases, the cassette is operably linked to a CMV promoter. In some cases, the cassette is operably linked to a U6 promoter. In some cases, the cassette is operably linked to an EF1α promoter. In some cases, the cassette is operably linked to an H1 promoter. In some cases, the recombinant expression vector comprises a 5′ AAV ITR sequence and a 3′ AAV ITR sequence. In some cases, the AAV ITRs are AAV9 ITRs. In some cases, the AAV ITRs are AAV2 ITRs.
19) In some cases, a recombinant expression vector comprises one of the following cassettes. In some cases, a cassette comprises, in order from 5′ to 3′: i) SEQ ID NO:854; ii) SEQ ID NO:395; iii) a sequence that is complementary to SEQ ID NO: 395, where the sequence can comprise from 0 to 10 mismatches (non-complementary nucleotides) to SEQ ID NO: 395; and iv) SEQ ID NO:855. In some cases, a cassette comprises, in order from 5′ to 3′: i) SEQ ID NO:856; ii) SEQ ID NO: 395; iii) a sequence that is complementary to SEQ ID NO: 395, where the sequence can comprise from 0 to 10 mismatches (non-complementary nucleotides) to SEQ ID NO: 395; and iv) SEQ ID NO: 857. In some cases, a cassette comprises, in order from 5′ to 3′: i) SEQ ID NO:858; ii) SEQ ID NO: 395; iii) a sequence that is complementary to SEQ ID NO: 395, where the sequence can comprise from 0 to 10 mismatches (non-complementary nucleotides) to SEQ ID NO: 395; and iv) SEQ ID NO:859. In some cases, the cassette is operably linked to a promoter that is functional in a eukaryotic cell. In some cases, the cassette is operably linked to an RNA polymerase II promoter. In some cases, the cassette is operably linked to an RNA polymerase III promoter. In some cases, the cassette is operably linked to a CAG promoter. In some cases, the cassette is operably linked to a CBA promoter. In some cases, the cassette is operably linked to a CMV promoter. In some cases, the cassette is operably linked to a U6 promoter. In some cases, the cassette is operably linked to an EF1α promoter. In some cases, the cassette is operably linked to an H1 promoter. In some cases, the recombinant expression vector comprises a 5′ AAV ITR sequence and a 3′ AAV ITR sequence. In some cases, the AAV ITRs are AAV9 ITRs. In some cases, the AAV ITRs are AAV2 ITRs.
20) In some cases, a recombinant expression vector comprises one of the following cassettes. In some cases, a cassette comprises, in order from 5′ to 3′: i) SEQ ID NO:854; ii) SEQ ID NO:396; iii) a sequence that is complementary to SEQ ID NO: 396, where the sequence can comprise from 0 to 10 mismatches (non-complementary nucleotides) to SEQ ID NO: 396; and iv) SEQ ID NO:855. In some cases, a cassette comprises, in order from 5′ to 3′: i) SEQ ID NO:856; ii) SEQ ID NO: 396; iii) a sequence that is complementary to SEQ ID NO: 396, where the sequence can comprise from 0 to 10 mismatches (non-complementary nucleotides) to SEQ ID NO: 396; and iv) SEQ ID NO: 857. In some cases, a cassette comprises, in order from 5′ to 3′: i) SEQ ID NO:858; ii) SEQ ID NO: 396; iii) a sequence that is complementary to SEQ ID NO: 396, where the sequence can comprise from 0 to 10 mismatches (non-complementary nucleotides) to SEQ ID NO: 396; and iv) SEQ ID NO:859. In some cases, the cassette is operably linked to a promoter that is functional in a eukaryotic cell. In some cases, the cassette is operably linked to an RNA polymerase II promoter. In some cases, the cassette is operably linked to an RNA polymerase III promoter. In some cases, the cassette is operably linked to a CAG promoter. In some cases, the cassette is operably linked to a CBA promoter. In some cases, the cassette is operably linked to a CMV promoter. In some cases, the cassette is operably linked to a U6 promoter. In some cases, the cassette is operably linked to an EF1α promoter. In some cases, the cassette is operably linked to an H1 promoter. In some cases, the recombinant expression vector comprises a 5′ AAV ITR sequence and a 3′ AAV ITR sequence. In some cases, the AAV ITRs are AAV9 ITRs. In some cases, the AAV ITRs are AAV2 ITRs. 21) In some cases, a recombinant expression vector comprises one of the following cassettes. In some cases, a cassette comprises, in order from 5′ to 3′: i) SEQ ID NO:854; ii) SEQ ID NO:397; iii) a sequence that is complementary to SEQ ID NO: 397, where the sequence can comprise from 0 to 10 mismatches (non-complementary nucleotides) to SEQ ID NO: 397; and iv) SEQ ID NO:855. In some cases, a cassette comprises, in order from 5′ to 3′: i) SEQ ID NO:856; ii) SEQ ID NO: 397; iii) a sequence that is complementary to SEQ ID NO: 397, where the sequence can comprise from 0 to 10 mismatches (non-complementary nucleotides) to SEQ ID NO: 397; and iv) SEQ ID NO: 857. In some cases, a cassette comprises, in order from 5′ to 3′: i) SEQ ID NO:858; ii) SEQ ID NO: 397; iii) a sequence that is complementary to SEQ ID NO: 397, where the sequence can comprise from 0 to 10 mismatches (non-complementary nucleotides) to SEQ ID NO: 397; and iv) SEQ ID NO:859. In some cases, the cassette is operably linked to a promoter that is functional in a eukaryotic cell. In some cases, the cassette is operably linked to an RNA polymerase II promoter. In some cases, the cassette is operably linked to an RNA polymerase III promoter. In some cases, the cassette is operably linked to a CAG promoter. In some cases, the cassette is operably linked to a CBA promoter. In some cases, the cassette is operably linked to a CMV promoter. In some cases, the cassette is operably linked to a U6 promoter. In some cases, the cassette is operably linked to an EF1α promoter. In some cases, the cassette is operably linked to an H1 promoter. In some cases, the recombinant expression vector comprises a 5′ AAV ITR sequence and a 3′ AAV ITR sequence. In some cases, the AAV ITRs are AAV9 ITRs. In some cases, the AAV ITRs are AAV2 ITRs.
22) In some cases, a recombinant expression vector comprises one of the following cassettes. In some cases, a cassette comprises, in order from 5′ to 3′: i) SEQ ID NO:854; ii) SEQ ID NO:398; iii) a sequence that is complementary to SEQ ID NO: 398, where the sequence can comprise from 0 to 10 mismatches (non-complementary nucleotides) to SEQ ID NO: 398; and iv) SEQ ID NO:855. In some cases, a cassette comprises, in order from 5′ to 3′: i) SEQ ID NO:856; ii) SEQ ID NO: 398; iii) a sequence that is complementary to SEQ ID NO: 398, where the sequence can comprise from 0 to 10 mismatches (non-complementary nucleotides) to SEQ ID NO: 398; and iv) SEQ ID NO: 857. In some cases, a cassette comprises, in order from 5′ to 3′: i) SEQ ID NO:858; ii) SEQ ID NO: 398; iii) a sequence that is complementary to SEQ ID NO: 398, where the sequence can comprise from 0 to 10 mismatches (non-complementary nucleotides) to SEQ ID NO: 398; and iv) SEQ ID NO:859. In some cases, the cassette is operably linked to a promoter that is functional in a eukaryotic cell. In some cases, the cassette is operably linked to an RNA polymerase II promoter. In some cases, the cassette is operably linked to an RNA polymerase III promoter. In some cases, the cassette is operably linked to a CAG promoter. In some cases, the cassette is operably linked to a CBA promoter. In some cases, the cassette is operably linked to a CMV promoter. In some cases, the cassette is operably linked to a U6 promoter. In some cases, the cassette is operably linked to an EF1α promoter. In some cases, the cassette is operably linked to an H1 promoter. In some cases, the recombinant expression vector comprises a 5′ AAV ITR sequence and a 3′ AAV ITR sequence. In some cases, the AAV ITRs are AAV9 ITRs. In some cases, the AAV ITRs are AAV2 ITRs.
23) In some cases, a recombinant expression vector comprises one of the following cassettes. In some cases, a cassette comprises, in order from 5′ to 3′: i) SEQ ID NO:854; ii) SEQ ID NO:399; iii) a sequence that is complementary to SEQ ID NO: 399, where the sequence can comprise from 0 to 10 mismatches (non-complementary nucleotides) to SEQ ID NO: 399; and iv) SEQ ID NO:855. In some cases, a cassette comprises, in order from 5′ to 3′: i) SEQ ID NO:856; ii) SEQ ID NO: 399; iii) a sequence that is complementary to SEQ ID NO: 399, where the sequence can comprise from 0 to 10 mismatches (non-complementary nucleotides) to SEQ ID NO: 399; and iv) SEQ ID NO: 857. In some cases, a cassette comprises, in order from 5′ to 3′: i) SEQ ID NO:858; ii) SEQ ID NO: 399; iii) a sequence that is complementary to SEQ ID NO: 399, where the sequence can comprise from 0 to 10 mismatches (non-complementary nucleotides) to SEQ ID NO: 399; and iv) SEQ ID NO:859. In some cases, the cassette is operably linked to a promoter that is functional in a eukaryotic cell. In some cases, the cassette is operably linked to an RNA polymerase II promoter. In some cases, the cassette is operably linked to an RNA polymerase III promoter. In some cases, the cassette is operably linked to a CAG promoter. In some cases, the cassette is operably linked to a CBA promoter. In some cases, the cassette is operably linked to a CMV promoter. In some cases, the cassette is operably linked to a U6 promoter. In some cases, the cassette is operably linked to an EF1α promoter. In some cases, the cassette is operably linked to an H1 promoter. In some cases, the recombinant expression vector comprises a 5′ AAV ITR sequence and a 3′ AAV ITR sequence. In some cases, the AAV ITRs are AAV9 ITRs. In some cases, the AAV ITRs are AAV2 ITRs.
24) In some cases, a recombinant expression vector comprises one of the following cassettes. In some cases, a cassette comprises, in order from 5′ to 3′: i) SEQ ID NO:854; ii) SEQ ID NO:400; iii) a sequence that is complementary to SEQ ID NO: 400, where the sequence can comprise from 0 to 10 mismatches (non-complementary nucleotides) to SEQ ID NO: 400; and iv) SEQ ID NO:855. In some cases, a cassette comprises, in order from 5′ to 3′: i) SEQ ID NO:856; ii) SEQ ID NO: 400; iii) a sequence that is complementary to SEQ ID NO: 400, where the sequence can comprise from 0 to 10 mismatches (non-complementary nucleotides) to SEQ ID NO: 400; and iv) SEQ ID NO: 857. In some cases, a cassette comprises, in order from 5′ to 3′: i) SEQ ID NO:858; ii) SEQ ID NO: 400; iii) a sequence that is complementary to SEQ ID NO: 400, where the sequence can comprise from 0 to 10 mismatches (non-complementary nucleotides) to SEQ ID NO: 400; and iv) SEQ ID NO:859. In some cases, the cassette is operably linked to a promoter that is functional in a eukaryotic cell. In some cases, the cassette is operably linked to an RNA polymerase II promoter. In some cases, the cassette is operably linked to an RNA polymerase III promoter. In some cases, the cassette is operably linked to a CAG promoter. In some cases, the cassette is operably linked to a CBA promoter. In some cases, the cassette is operably linked to a CMV promoter. In some cases, the cassette is operably linked to a U6 promoter. In some cases, the cassette is operably linked to an EF1α promoter. In some cases, the cassette is operably linked to an H1 promoter. In some cases, the recombinant expression vector comprises a 5′ AAV ITR sequence and a 3′ AAV ITR sequence. In some cases, the AAV ITRs are AAV9 ITRs. In some cases, the AAV ITRs are AAV2 ITRs.
25) In some cases, a recombinant expression vector comprises one of the following cassettes. In some cases, a cassette comprises, in order from 5′ to 3′: i) SEQ ID NO:854; ii) SEQ ID NO:401; iii) a sequence that is complementary to SEQ ID NO: 401, where the sequence can comprise from 0 to 10 mismatches (non-complementary nucleotides) to SEQ ID NO: 401; and iv) SEQ ID NO:855. In some cases, a cassette comprises, in order from 5′ to 3′: i) SEQ ID NO:856; ii) SEQ ID NO: 401; iii) a sequence that is complementary to SEQ ID NO: 401, where the sequence can comprise from 0 to 10 mismatches (non-complementary nucleotides) to SEQ ID NO: 401; and iv) SEQ ID NO: 857. In some cases, a cassette comprises, in order from 5′ to 3′: i) SEQ ID NO:858; ii) SEQ ID NO: 401; iii) a sequence that is complementary to SEQ ID NO: 401, where the sequence can comprise from 0 to 10 mismatches (non-complementary nucleotides) to SEQ ID NO: 401; and iv) SEQ ID NO:859. In some cases, the cassette is operably linked to a promoter that is functional in a eukaryotic cell. In some cases, the cassette is operably linked to an RNA polymerase II promoter. In some cases, the cassette is operably linked to an RNA polymerase III promoter. In some cases, the cassette is operably linked to a CAG promoter. In some cases, the cassette is operably linked to a CBA promoter. In some cases, the cassette is operably linked to a CMV promoter. In some cases, the cassette is operably linked to a U6 promoter. In some cases, the cassette is operably linked to an EF1α promoter. In some cases, the cassette is operably linked to an H1 promoter. In some cases, the recombinant expression vector comprises a 5′ AAV ITR sequence and a 3′ AAV ITR sequence. In some cases, the AAV ITRs are AAV9 ITRs. In some cases, the AAV ITRs are AAV2 ITRs.
26) In some cases, a recombinant expression vector comprises one of the following cassettes. In some cases, a cassette comprises, in order from 5′ to 3′: i) SEQ ID NO:854; ii) SEQ ID NO:402; iii) a sequence that is complementary to SEQ ID NO: 402, where the sequence can comprise from 0 to 10 mismatches (non-complementary nucleotides) to SEQ ID NO: 402; and iv) SEQ ID NO:855. In some cases, a cassette comprises, in order from 5′ to 3′: i) SEQ ID NO:856; ii) SEQ ID NO: 402; iii) a sequence that is complementary to SEQ ID NO: 402, where the sequence can comprise from 0 to 10 mismatches (non-complementary nucleotides) to SEQ ID NO: 402; and iv) SEQ ID NO: 857. In some cases, a cassette comprises, in order from 5′ to 3′: i) SEQ ID NO:858; ii) SEQ ID NO: 402; iii) a sequence that is complementary to SEQ ID NO: 402, where the sequence can comprise from 0 to 10 mismatches (non-complementary nucleotides) to SEQ ID NO: 402; and iv) SEQ ID NO:859. In some cases, the cassette is operably linked to a promoter that is functional in a eukaryotic cell. In some cases, the cassette is operably linked to an RNA polymerase II promoter. In some cases, the cassette is operably linked to an RNA polymerase III promoter. In some cases, the cassette is operably linked to a CAG promoter. In some cases, the cassette is operably linked to a CBA promoter. In some cases, the cassette is operably linked to a CMV promoter. In some cases, the cassette is operably linked to a U6 promoter. In some cases, the cassette is operably linked to an EF1α promoter. In some cases, the cassette is operably linked to an H1 promoter. In some cases, the recombinant expression vector comprises a 5′ AAV ITR sequence and a 3′ AAV ITR sequence. In some cases, the AAV ITRs are AAV9 ITRs. In some cases, the AAV ITRs are AAV2 ITRs. 27) In some cases, a recombinant expression vector comprises one of the following cassettes. In some cases, a cassette comprises, in order from 5′ to 3′: i) SEQ ID NO:854; ii) SEQ ID NO:403; iii) a sequence that is complementary to SEQ ID NO: 403, where the sequence can comprise from 0 to 10 mismatches (non-complementary nucleotides) to SEQ ID NO: 403; and iv) SEQ ID NO:855. In some cases, a cassette comprises, in order from 5′ to 3′: i) SEQ ID NO:856; ii) SEQ ID NO: 403; iii) a sequence that is complementary to SEQ ID NO: 403, where the sequence can comprise from 0 to 10 mismatches (non-complementary nucleotides) to SEQ ID NO: 403; and iv) SEQ ID NO: 857. In some cases, a cassette comprises, in order from 5′ to 3′: i) SEQ ID NO:858; ii) SEQ ID NO: 403; iii) a sequence that is complementary to SEQ ID NO: 403, where the sequence can comprise from 0 to 10 mismatches (non-complementary nucleotides) to SEQ ID NO: 403; and iv) SEQ ID NO:859. In some cases, the cassette is operably linked to a promoter that is functional in a eukaryotic cell. In some cases, the cassette is operably linked to an RNA polymerase II promoter. In some cases, the cassette is operably linked to an RNA polymerase III promoter. In some cases, the cassette is operably linked to a CAG promoter. In some cases, the cassette is operably linked to a CBA promoter. In some cases, the cassette is operably linked to a CMV promoter. In some cases, the cassette is operably linked to a U6 promoter. In some cases, the cassette is operably linked to an EF1α promoter. In some cases, the cassette is operably linked to an H1 promoter. In some cases, the recombinant expression vector comprises a 5′ AAV ITR sequence and a 3′ AAV ITR sequence. In some cases, the AAV ITRs are AAV9 ITRs. In some cases, the AAV ITRs are AAV2 ITRs.
28) In some cases, a recombinant expression vector comprises one of the following cassettes. In some cases, a cassette comprises, in order from 5′ to 3′: i) SEQ ID NO:854; ii) SEQ ID NO:404; iii) a sequence that is complementary to SEQ ID NO: 404, where the sequence can comprise from 0 to 10 mismatches (non-complementary nucleotides) to SEQ ID NO: 404; and iv) SEQ ID NO:855. In some cases, a cassette comprises, in order from 5′ to 3′: i) SEQ ID NO:856; ii) SEQ ID NO: 404; iii) a sequence that is complementary to SEQ ID NO: 404, where the sequence can comprise from 0 to 10 mismatches (non-complementary nucleotides) to SEQ ID NO: 404; and iv) SEQ ID NO: 857. In some cases, a cassette comprises, in order from 5′ to 3′: i) SEQ ID NO:858; ii) SEQ ID NO: 404; iii) a sequence that is complementary to SEQ ID NO: 404, where the sequence can comprise from 0 to 10 mismatches (non-complementary nucleotides) to SEQ ID NO: 404; and iv) SEQ ID NO:859. In some cases, the cassette is operably linked to a promoter that is functional in a eukaryotic cell. In some cases, the cassette is operably linked to an RNA polymerase II promoter. In some cases, the cassette is operably linked to an RNA polymerase III promoter. In some cases, the cassette is operably linked to a CAG promoter. In some cases, the cassette is operably linked to a CBA promoter. In some cases, the cassette is operably linked to a CMV promoter. In some cases, the cassette is operably linked to a U6 promoter. In some cases, the cassette is operably linked to an EF1α promoter. In some cases, the cassette is operably linked to an H1 promoter. In some cases, the recombinant expression vector comprises a 5′ AAV ITR sequence and a 3′ AAV ITR sequence. In some cases, the AAV ITRs are AAV9 ITRs. In some cases, the AAV ITRs are AAV2 ITRs.
29) In some cases, a recombinant expression vector comprises one of the following cassettes. In some cases, a cassette comprises, in order from 5′ to 3′: i) SEQ ID NO:854; ii) SEQ ID NO:405; iii) a sequence that is complementary to SEQ ID NO: 405, where the sequence can comprise from 0 to 10 mismatches (non-complementary nucleotides) to SEQ ID NO: 405; and iv) SEQ ID NO:855. In some cases, a cassette comprises, in order from 5′ to 3′: i) SEQ ID NO:856; ii) SEQ ID NO: 405; iii) a sequence that is complementary to SEQ ID NO: 405, where the sequence can comprise from 0 to 10 mismatches (non-complementary nucleotides) to SEQ ID NO: 405; and iv) SEQ ID NO: 857. In some cases, a cassette comprises, in order from 5′ to 3′: i) SEQ ID NO:858; ii) SEQ ID NO: 405; iii) a sequence that is complementary to SEQ ID NO: 405, where the sequence can comprise from 0 to 10 mismatches (non-complementary nucleotides) to SEQ ID NO: 405; and iv) SEQ ID NO:859. In some cases, the cassette is operably linked to a promoter that is functional in a eukaryotic cell. In some cases, the cassette is operably linked to an RNA polymerase II promoter. In some cases, the cassette is operably linked to an RNA polymerase III promoter. In some cases, the cassette is operably linked to a CAG promoter. In some cases, the cassette is operably linked to a CBA promoter. In some cases, the cassette is operably linked to a CMV promoter. In some cases, the cassette is operably linked to a U6 promoter. In some cases, the cassette is operably linked to an EF1α promoter. In some cases, the cassette is operably linked to an H1 promoter. In some cases, the recombinant expression vector comprises a 5′ AAV ITR sequence and a 3′ AAV ITR sequence. In some cases, the AAV ITRs are AAV9 ITRs. In some cases, the AAV ITRs are AAV2 ITRs.
30) In some cases, a recombinant expression vector comprises one of the following cassettes. In some cases, a cassette comprises, in order from 5′ to 3′: i) SEQ ID NO:854; ii) SEQ ID NO:406; iii) a sequence that is complementary to SEQ ID NO: 406, where the sequence can comprise from 0 to 10 mismatches (non-complementary nucleotides) to SEQ ID NO: 406; and iv) SEQ ID NO:855. In some cases, a cassette comprises, in order from 5′ to 3′: i) SEQ ID NO:856; ii) SEQ ID NO: 406; iii) a sequence that is complementary to SEQ ID NO: 406, where the sequence can comprise from 0 to 10 mismatches (non-complementary nucleotides) to SEQ ID NO: 406; and iv) SEQ ID NO: 857. In some cases, a cassette comprises, in order from 5′ to 3′: i) SEQ ID NO:858; ii) SEQ ID NO: 406; iii) a sequence that is complementary to SEQ ID NO: 406, where the sequence can comprise from 0 to 10 mismatches (non-complementary nucleotides) to SEQ ID NO: 406; and iv) SEQ ID NO:859. In some cases, the cassette is operably linked to a promoter that is functional in a eukaryotic cell. In some cases, the cassette is operably linked to an RNA polymerase II promoter. In some cases, the cassette is operably linked to an RNA polymerase III promoter. In some cases, the cassette is operably linked to a CAG promoter. In some cases, the cassette is operably linked to a CBA promoter. In some cases, the cassette is operably linked to a CMV promoter. In some cases, the cassette is operably linked to a U6 promoter. In some cases, the cassette is operably linked to an EF1α promoter. In some cases, the cassette is operably linked to an H1 promoter. In some cases, the recombinant expression vector comprises a 5′ AAV ITR sequence and a 3′ AAV ITR sequence. In some cases, the AAV ITRs are AAV9 ITRs. In some cases, the AAV ITRs are AAV2 ITRs.
31) In some cases, a recombinant expression vector comprises one of the following cassettes. In some cases, a cassette comprises, in order from 5′ to 3′: i) SEQ ID NO:854; ii) SEQ ID NO:407; iii) a sequence that is complementary to SEQ ID NO: 407, where the sequence can comprise from 0 to 10 mismatches (non-complementary nucleotides) to SEQ ID NO: 407; and iv) SEQ ID NO:855. In some cases, a cassette comprises, in order from 5′ to 3′: i) SEQ ID NO:856; ii) SEQ ID NO: 407; iii) a sequence that is complementary to SEQ ID NO: 407, where the sequence can comprise from 0 to 10 mismatches (non-complementary nucleotides) to SEQ ID NO: 407; and iv) SEQ ID NO: 857. In some cases, a cassette comprises, in order from 5′ to 3′: i) SEQ ID NO:858; ii) SEQ ID NO: 407; iii) a sequence that is complementary to SEQ ID NO: 407, where the sequence can comprise from 0 to 10 mismatches (non-complementary nucleotides) to SEQ ID NO: 407; and iv) SEQ ID NO:859. In some cases, the cassette is operably linked to a promoter that is functional in a eukaryotic cell. In some cases, the cassette is operably linked to an RNA polymerase II promoter. In some cases, the cassette is operably linked to an RNA polymerase III promoter. In some cases, the cassette is operably linked to a CAG promoter. In some cases, the cassette is operably linked to a CBA promoter. In some cases, the cassette is operably linked to a CMV promoter. In some cases, the cassette is operably linked to a U6 promoter. In some cases, the cassette is operably linked to an EF1α promoter. In some cases, the cassette is operably linked to an H1 promoter. In some cases, the recombinant expression vector comprises a 5′ AAV ITR sequence and a 3′ AAV ITR sequence. In some cases, the AAV ITRs are AAV9 ITRs. In some cases, the AAV ITRs are AAV2 ITRs.
32) In some cases, a recombinant expression vector comprises one of the following cassettes. In some cases, a cassette comprises, in order from 5′ to 3′: i) SEQ ID NO:854; ii) SEQ ID NO:408; iii) a sequence that is complementary to SEQ ID NO: 408, where the sequence can comprise from 0 to 10 mismatches (non-complementary nucleotides) to SEQ ID NO: 408; and iv) SEQ ID NO:855. In some cases, a cassette comprises, in order from 5′ to 3′: i) SEQ ID NO:856; ii) SEQ ID NO: 408; iii) a sequence that is complementary to SEQ ID NO: 408, where the sequence can comprise from 0 to 10 mismatches (non-complementary nucleotides) to SEQ ID NO: 408; and iv) SEQ ID NO: 857. In some cases, a cassette comprises, in order from 5′ to 3′: i) SEQ ID NO:858; ii) SEQ ID NO: 408; iii) a sequence that is complementary to SEQ ID NO: 408, where the sequence can comprise from 0 to 10 mismatches (non-complementary nucleotides) to SEQ ID NO: 408; and iv) SEQ ID NO:859. In some cases, the cassette is operably linked to a promoter that is functional in a eukaryotic cell. In some cases, the cassette is operably linked to an RNA polymerase II promoter. In some cases, the cassette is operably linked to an RNA polymerase III promoter. In some cases, the cassette is operably linked to a CAG promoter. In some cases, the cassette is operably linked to a CBA promoter. In some cases, the cassette is operably linked to a CMV promoter. In some cases, the cassette is operably linked to a U6 promoter. In some cases, the cassette is operably linked to an EF1α promoter. In some cases, the cassette is operably linked to an H1 promoter. In some cases, the recombinant expression vector comprises a 5′ AAV ITR sequence and a 3′ AAV ITR sequence. In some cases, the AAV ITRs are AAV9 ITRs. In some cases, the AAV ITRs are AAV2 ITRs.
33) In some cases, a recombinant expression vector comprises one of the following cassettes. In some cases, a cassette comprises, in order from 5′ to 3′: i) SEQ ID NO:854; ii) SEQ ID NO:409; iii) a sequence that is complementary to SEQ ID NO: 409, where the sequence can comprise from 0 to 10 mismatches (non-complementary nucleotides) to SEQ ID NO: 409; and iv) SEQ ID NO:855. In some cases, a cassette comprises, in order from 5′ to 3′: i) SEQ ID NO:856; ii) SEQ ID NO: 409; iii) a sequence that is complementary to SEQ ID NO: 409, where the sequence can comprise from 0 to 10 mismatches (non-complementary nucleotides) to SEQ ID NO: 409; and iv) SEQ ID NO: 857. In some cases, a cassette comprises, in order from 5′ to 3′: i) SEQ ID NO:858; ii) SEQ ID NO: 409; iii) a sequence that is complementary to SEQ ID NO: 409, where the sequence can comprise from 0 to 10 mismatches (non-complementary nucleotides) to SEQ ID NO: 409; and iv) SEQ ID NO:859. In some cases, the cassette is operably linked to a promoter that is functional in a eukaryotic cell. In some cases, the cassette is operably linked to an RNA polymerase II promoter. In some cases, the cassette is operably linked to an RNA polymerase III promoter. In some cases, the cassette is operably linked to a CAG promoter. In some cases, the cassette is operably linked to a CBA promoter. In some cases, the cassette is operably linked to a CMV promoter. In some cases, the cassette is operably linked to a U6 promoter. In some cases, the cassette is operably linked to an EF1α promoter. In some cases, the cassette is operably linked to an H1 promoter. In some cases, the recombinant expression vector comprises a 5′ AAV ITR sequence and a 3′ AAV ITR sequence. In some cases, the AAV ITRs are AAV9 ITRs. In some cases, the AAV ITRs are AAV2 ITRs.
34) In some cases, a recombinant expression vector comprises one of the following cassettes. In some cases, a cassette comprises, in order from 5′ to 3′: i) SEQ ID NO:854; ii) SEQ ID NO:410; iii) a sequence that is complementary to SEQ ID NO: 410, where the sequence can comprise from 0 to 10 mismatches (non-complementary nucleotides) to SEQ ID NO: 410; and iv) SEQ ID NO:855. In some cases, a cassette comprises, in order from 5′ to 3′: i) SEQ ID NO:856; ii) SEQ ID NO: 410; iii) a sequence that is complementary to SEQ ID NO: 410, where the sequence can comprise from 0 to 10 mismatches (non-complementary nucleotides) to SEQ ID NO: 410; and iv) SEQ ID NO: 857. In some cases, a cassette comprises, in order from 5′ to 3′: i) SEQ ID NO:858; ii) SEQ ID NO: 410; iii) a sequence that is complementary to SEQ ID NO: 410, where the sequence can comprise from 0 to 10 mismatches (non-complementary nucleotides) to SEQ ID NO: 410; and iv) SEQ ID NO:859. In some cases, the cassette is operably linked to a promoter that is functional in a eukaryotic cell. In some cases, the cassette is operably linked to an RNA polymerase II promoter. In some cases, the cassette is operably linked to an RNA polymerase III promoter. In some cases, the cassette is operably linked to a CAG promoter. In some cases, the cassette is operably linked to a CBA promoter. In some cases, the cassette is operably linked to a CMV promoter. In some cases, the cassette is operably linked to a U6 promoter. In some cases, the cassette is operably linked to an EF1α promoter. In some cases, the cassette is operably linked to an H1 promoter. In some cases, the recombinant expression vector comprises a 5′ AAV ITR sequence and a 3′ AAV ITR sequence. In some cases, the AAV ITRs are AAV9 ITRs. In some cases, the AAV ITRs are AAV2 ITRs.
35) In some cases, a recombinant expression vector comprises one of the following cassettes. In some cases, a cassette comprises, in order from 5′ to 3′: i) SEQ ID NO:854; ii) SEQ ID NO:411; iii) a sequence that is complementary to SEQ ID NO: 411, where the sequence can comprise from 0 to 10 mismatches (non-complementary nucleotides) to SEQ ID NO: 411; and iv) SEQ ID NO:855. In some cases, a cassette comprises, in order from 5′ to 3′: i) SEQ ID NO:856; ii) SEQ ID NO: 411; iii) a sequence that is complementary to SEQ ID NO: 411, where the sequence can comprise from 0 to 10 mismatches (non-complementary nucleotides) to SEQ ID NO: 411; and iv) SEQ ID NO: 857. In some cases, a cassette comprises, in order from 5′ to 3′: i) SEQ ID NO:858; ii) SEQ ID NO: 411; iii) a sequence that is complementary to SEQ ID NO: 411, where the sequence can comprise from 0 to 10 mismatches (non-complementary nucleotides) to SEQ ID NO: 411; and iv) SEQ ID NO:859. In some cases, the cassette is operably linked to a promoter that is functional in a eukaryotic cell. In some cases, the cassette is operably linked to an RNA polymerase II promoter. In some cases, the cassette is operably linked to an RNA polymerase III promoter. In some cases, the cassette is operably linked to a CAG promoter. In some cases, the cassette is operably linked to a CBA promoter. In some cases, the cassette is operably linked to a CMV promoter. In some cases, the cassette is operably linked to a U6 promoter. In some cases, the cassette is operably linked to an EF1α promoter. In some cases, the cassette is operably linked to an H1 promoter. In some cases, the recombinant expression vector comprises a 5′ AAV ITR sequence and a 3′ AAV ITR sequence. In some cases, the AAV ITRs are AAV9 ITRs. In some cases, the AAV ITRs are AAV2 ITRs.
36) In some cases, a recombinant expression vector comprises one of the following cassettes. In some cases, a cassette comprises, in order from 5′ to 3′: i) SEQ ID NO:854; ii) SEQ ID NO:412; iii) a sequence that is complementary to SEQ ID NO: 412, where the sequence can comprise from 0 to 10 mismatches (non-complementary nucleotides) to SEQ ID NO: 412; and iv) SEQ ID NO:855. In some cases, a cassette comprises, in order from 5′ to 3′: i) SEQ ID NO:856; ii) SEQ ID NO: 412; iii) a sequence that is complementary to SEQ ID NO: 412, where the sequence can comprise from 0 to 10 mismatches (non-complementary nucleotides) to SEQ ID NO: 412; and iv) SEQ ID NO: 857. In some cases, a cassette comprises, in order from 5′ to 3′: i) SEQ ID NO:858; ii) SEQ ID NO: 412; iii) a sequence that is complementary to SEQ ID NO: 412, where the sequence can comprise from 0 to 10 mismatches (non-complementary nucleotides) to SEQ ID NO: 412; and iv) SEQ ID NO:859. In some cases, the cassette is operably linked to a promoter that is functional in a eukaryotic cell. In some cases, the cassette is operably linked to an RNA polymerase II promoter. In some cases, the cassette is operably linked to an RNA polymerase III promoter. In some cases, the cassette is operably linked to a CAG promoter. In some cases, the cassette is operably linked to a CBA promoter. In some cases, the cassette is operably linked to a CMV promoter. In some cases, the cassette is operably linked to a U6 promoter. In some cases, the cassette is operably linked to an EF1α promoter. In some cases, the cassette is operably linked to an H1 promoter. In some cases, the recombinant expression vector comprises a 5′ AAV ITR sequence and a 3′ AAV ITR sequence. In some cases, the AAV ITRs are AAV9 ITRs. In some cases, the AAV ITRs are AAV2 ITRs.
37) In some cases, a recombinant expression vector comprises one of the following cassettes. In some cases, a cassette comprises, in order from 5′ to 3′: i) SEQ ID NO:854; ii) SEQ ID NO:413; iii) a sequence that is complementary to SEQ ID NO: 413, where the sequence can comprise from 0 to 10 mismatches (non-complementary nucleotides) to SEQ ID NO: 413; and iv) SEQ ID NO:855. In some cases, a cassette comprises, in order from 5′ to 3′: i) SEQ ID NO:856; ii) SEQ ID NO: 413; iii) a sequence that is complementary to SEQ ID NO: 413, where the sequence can comprise from 0 to 10 mismatches (non-complementary nucleotides) to SEQ ID NO: 413; and iv) SEQ ID NO: 857. In some cases, a cassette comprises, in order from 5′ to 3′: i) SEQ ID NO:858; ii) SEQ ID NO: 413; iii) a sequence that is complementary to SEQ ID NO: 413, where the sequence can comprise from 0 to 10 mismatches (non-complementary nucleotides) to SEQ ID NO: 413; and iv) SEQ ID NO:859. In some cases, the cassette is operably linked to a promoter that is functional in a eukaryotic cell. In some cases, the cassette is operably linked to an RNA polymerase II promoter. In some cases, the cassette is operably linked to an RNA polymerase III promoter. In some cases, the cassette is operably linked to a CAG promoter. In some cases, the cassette is operably linked to a CBA promoter. In some cases, the cassette is operably linked to a CMV promoter. In some cases, the cassette is operably linked to a U6 promoter. In some cases, the cassette is operably linked to an EF1α promoter. In some cases, the cassette is operably linked to an H1 promoter. In some cases, the recombinant expression vector comprises a 5′ AAV ITR sequence and a 3′ AAV ITR sequence. In some cases, the AAV ITRs are AAV9 ITRs. In some cases, the AAV ITRs are AAV2 ITRs.
38) In some cases, a recombinant expression vector comprises one of the following cassettes. In some cases, a cassette comprises, in order from 5′ to 3′: i) SEQ ID NO:854; ii) SEQ ID NO:414; iii) a sequence that is complementary to SEQ ID NO: 414, where the sequence can comprise from 0 to 10 mismatches (non-complementary nucleotides) to SEQ ID NO: 414; and iv) SEQ ID NO:855. In some cases, a cassette comprises, in order from 5′ to 3′: i) SEQ ID NO:856; ii) SEQ ID NO: 414; iii) a sequence that is complementary to SEQ ID NO: 414, where the sequence can comprise from 0 to 10 mismatches (non-complementary nucleotides) to SEQ ID NO: 414; and iv) SEQ ID NO: 857. In some cases, a cassette comprises, in order from 5′ to 3′: i) SEQ ID NO:858; ii) SEQ ID NO: 414; iii) a sequence that is complementary to SEQ ID NO: 414, where the sequence can comprise from 0 to 10 mismatches (non-complementary nucleotides) to SEQ ID NO: 414; and iv) SEQ ID NO:859. In some cases, the cassette is operably linked to a promoter that is functional in a eukaryotic cell. In some cases, the cassette is operably linked to an RNA polymerase II promoter. In some cases, the cassette is operably linked to an RNA polymerase III promoter. In some cases, the cassette is operably linked to a CAG promoter. In some cases, the cassette is operably linked to a CBA promoter. In some cases, the cassette is operably linked to a CMV promoter. In some cases, the cassette is operably linked to a U6 promoter. In some cases, the cassette is operably linked to an EF1α promoter. In some cases, the cassette is operably linked to an H1 promoter. In some cases, the recombinant expression vector comprises a 5′ AAV ITR sequence and a 3′ AAV ITR sequence. In some cases, the AAV ITRs are AAV9 ITRs. In some cases, the AAV ITRs are AAV2 ITRs.
39) In some cases, a recombinant expression vector comprises one of the following cassettes. In some cases, a cassette comprises, in order from 5′ to 3′: i) SEQ ID NO:854; ii) SEQ ID NO:415; iii) a sequence that is complementary to SEQ ID NO: 415, where the sequence can comprise from 0 to 10 mismatches (non-complementary nucleotides) to SEQ ID NO: 415; and iv) SEQ ID NO:855. In some cases, a cassette comprises, in order from 5′ to 3′: i) SEQ ID NO:856; ii) SEQ ID NO: 415; iii) a sequence that is complementary to SEQ ID NO: 415, where the sequence can comprise from 0 to 10 mismatches (non-complementary nucleotides) to SEQ ID NO: 415; and iv) SEQ ID NO: 857. In some cases, a cassette comprises, in order from 5′ to 3′: i) SEQ ID NO:858; ii) SEQ ID NO: 415; iii) a sequence that is complementary to SEQ ID NO: 415, where the sequence can comprise from 0 to 10 mismatches (non-complementary nucleotides) to SEQ ID NO: 415; and iv) SEQ ID NO:859. In some cases, the cassette is operably linked to a promoter that is functional in a eukaryotic cell. In some cases, the cassette is operably linked to an RNA polymerase II promoter. In some cases, the cassette is operably linked to an RNA polymerase III promoter. In some cases, the cassette is operably linked to a CAG promoter. In some cases, the cassette is operably linked to a CBA promoter. In some cases, the cassette is operably linked to a CMV promoter. In some cases, the cassette is operably linked to a U6 promoter. In some cases, the cassette is operably linked to an EF1α promoter. In some cases, the cassette is operably linked to an H1 promoter. In some cases, the recombinant expression vector comprises a 5′ AAV ITR sequence and a 3′ AAV ITR sequence. In some cases, the AAV ITRs are AAV9 ITRs. In some cases, the AAV ITRs are AAV2 ITRs.
40) In some cases, a recombinant expression vector comprises one of the following cassettes. In some cases, a cassette comprises, in order from 5′ to 3′: i) SEQ ID NO:854; ii) SEQ ID NO:416; iii) a sequence that is complementary to SEQ ID NO: 416, where the sequence can comprise from 0 to 10 mismatches (non-complementary nucleotides) to SEQ ID NO: 416; and iv) SEQ ID NO:855. In some cases, a cassette comprises, in order from 5′ to 3′: i) SEQ ID NO:856; ii) SEQ ID NO: 416; iii) a sequence that is complementary to SEQ ID NO: 416, where the sequence can comprise from 0 to 10 mismatches (non-complementary nucleotides) to SEQ ID NO: 416; and iv) SEQ ID NO: 857. In some cases, a cassette comprises, in order from 5′ to 3′: i) SEQ ID NO:858; ii) SEQ ID NO: 416; iii) a sequence that is complementary to SEQ ID NO: 416, where the sequence can comprise from 0 to 10 mismatches (non-complementary nucleotides) to SEQ ID NO: 416; and iv) SEQ ID NO:859. In some cases, the cassette is operably linked to a promoter that is functional in a eukaryotic cell. In some cases, the cassette is operably linked to an RNA polymerase II promoter. In some cases, the cassette is operably linked to an RNA polymerase III promoter. In some cases, the cassette is operably linked to a CAG promoter. In some cases, the cassette is operably linked to a CBA promoter. In some cases, the cassette is operably linked to a CMV promoter. In some cases, the cassette is operably linked to a U6 promoter. In some cases, the cassette is operably linked to an EF1α promoter. In some cases, the cassette is operably linked to an H1 promoter. In some cases, the recombinant expression vector comprises a 5′ AAV ITR sequence and a 3′ AAV ITR sequence. In some cases, the AAV ITRs are AAV9 ITRs. In some cases, the AAV ITRs are AAV2 ITRs.
41) In some cases, a recombinant expression vector comprises one of the following cassettes. In some cases, a cassette comprises, in order from 5′ to 3′: i) SEQ ID NO:854; ii) SEQ ID NO:417; iii) a sequence that is complementary to SEQ ID NO: 417, where the sequence can comprise from 0 to 10 mismatches (non-complementary nucleotides) to SEQ ID NO: 417; and iv) SEQ ID NO:855. In some cases, a cassette comprises, in order from 5′ to 3′: i) SEQ ID NO:856; ii) SEQ ID NO: 417; iii) a sequence that is complementary to SEQ ID NO: 417, where the sequence can comprise from 0 to 10 mismatches (non-complementary nucleotides) to SEQ ID NO: 417; and iv) SEQ ID NO: 857. In some cases, a cassette comprises, in order from 5′ to 3′: i) SEQ ID NO:858; ii) SEQ ID NO: 417; iii) a sequence that is complementary to SEQ ID NO: 417, where the sequence can comprise from 0 to 10 mismatches (non-complementary nucleotides) to SEQ ID NO: 417; and iv) SEQ ID NO:859. In some cases, the cassette is operably linked to a promoter that is functional in a eukaryotic cell. In some cases, the cassette is operably linked to an RNA polymerase II promoter. In some cases, the cassette is operably linked to an RNA polymerase III promoter. In some cases, the cassette is operably linked to a CAG promoter. In some cases, the cassette is operably linked to a CBA promoter. In some cases, the cassette is operably linked to a CMV promoter. In some cases, the cassette is operably linked to a U6 promoter. In some cases, the cassette is operably linked to an EF1α promoter. In some cases, the cassette is operably linked to an H1 promoter. In some cases, the recombinant expression vector comprises a 5′ AAV ITR sequence and a 3′ AAV ITR sequence. In some cases, the AAV ITRs are AAV9 ITRs. In some cases, the AAV ITRs are AAV2 ITRs. 42) In some cases, a recombinant expression vector comprises one of the following cassettes. In some cases, a cassette comprises, in order from 5′ to 3′: i) SEQ ID NO:854; ii) SEQ ID NO:418; iii) a sequence that is complementary to SEQ ID NO: 418, where the sequence can comprise from 0 to 10 mismatches (non-complementary nucleotides) to SEQ ID NO: 418; and iv) SEQ ID NO:855. In some cases, a cassette comprises, in order from 5′ to 3′: i) SEQ ID NO:856; ii) SEQ ID NO: 418; iii) a sequence that is complementary to SEQ ID NO: 418, where the sequence can comprise from 0 to 10 mismatches (non-complementary nucleotides) to SEQ ID NO: 418; and iv) SEQ ID NO: 857. In some cases, a cassette comprises, in order from 5′ to 3′: i) SEQ ID NO:858; ii) SEQ ID NO: 418; iii) a sequence that is complementary to SEQ ID NO: 418, where the sequence can comprise from 0 to 10 mismatches (non-complementary nucleotides) to SEQ ID NO: 418; and iv) SEQ ID NO:859. In some cases, the cassette is operably linked to a promoter that is functional in a eukaryotic cell. In some cases, the cassette is operably linked to an RNA polymerase II promoter. In some cases, the cassette is operably linked to an RNA polymerase III promoter. In some cases, the cassette is operably linked to a CAG promoter. In some cases, the cassette is operably linked to a CBA promoter. In some cases, the cassette is operably linked to a CMV promoter. In some cases, the cassette is operably linked to a U6 promoter. In some cases, the cassette is operably linked to an EF1α promoter. In some cases, the cassette is operably linked to an H1 promoter. In some cases, the recombinant expression vector comprises a 5′ AAV ITR sequence and a 3′ AAV ITR sequence. In some cases, the AAV ITRs are AAV9 ITRs. In some cases, the AAV ITRs are AAV2 ITRs.
43) In some cases, a recombinant expression vector comprises one of the following cassettes. In some cases, a cassette comprises, in order from 5′ to 3′: i) SEQ ID NO:854; ii) SEQ ID NO:419; iii) a sequence that is complementary to SEQ ID NO: 419, where the sequence can comprise from 0 to 10 mismatches (non-complementary nucleotides) to SEQ ID NO: 419; and iv) SEQ ID NO:855. In some cases, a cassette comprises, in order from 5′ to 3′: i) SEQ ID NO:856; ii) SEQ ID NO: 419; iii) a sequence that is complementary to SEQ ID NO: 419, where the sequence can comprise from 0 to 10 mismatches (non-complementary nucleotides) to SEQ ID NO: 419; and iv) SEQ ID NO: 857. In some cases, a cassette comprises, in order from 5′ to 3′: i) SEQ ID NO:858; ii) SEQ ID NO: 419; iii) a sequence that is complementary to SEQ ID NO: 419, where the sequence can comprise from 0 to 10 mismatches (non-complementary nucleotides) to SEQ ID NO: 419; and iv) SEQ ID NO:859. In some cases, the cassette is operably linked to a promoter that is functional in a eukaryotic cell. In some cases, the cassette is operably linked to an RNA polymerase II promoter. In some cases, the cassette is operably linked to an RNA polymerase III promoter. In some cases, the cassette is operably linked to a CAG promoter. In some cases, the cassette is operably linked to a CBA promoter. In some cases, the cassette is operably linked to a CMV promoter. In some cases, the cassette is operably linked to a U6 promoter. In some cases, the cassette is operably linked to an EF1α promoter. In some cases, the cassette is operably linked to an H1 promoter. In some cases, the recombinant expression vector comprises a 5′ AAV ITR sequence and a 3′ AAV ITR sequence. In some cases, the AAV ITRs are AAV9 ITRs. In some cases, the AAV ITRs are AAV2 ITRs.
44) In some cases, a recombinant expression vector comprises one of the following cassettes. In some cases, a cassette comprises, in order from 5′ to 3′: i) SEQ ID NO:854; ii) SEQ ID NO:420; iii) a sequence that is complementary to SEQ ID NO: 420, where the sequence can comprise from 0 to 10 mismatches (non-complementary nucleotides) to SEQ ID NO: 420; and iv) SEQ ID NO:855. In some cases, a cassette comprises, in order from 5′ to 3′: i) SEQ ID NO:856; ii) SEQ ID NO: 420; iii) a sequence that is complementary to SEQ ID NO: 420, where the sequence can comprise from 0 to 10 mismatches (non-complementary nucleotides) to SEQ ID NO: 420; and iv) SEQ ID NO: 857. In some cases, a cassette comprises, in order from 5′ to 3′: i) SEQ ID NO:858; ii) SEQ ID NO: 420; iii) a sequence that is complementary to SEQ ID NO: 420, where the sequence can comprise from 0 to 10 mismatches (non-complementary nucleotides) to SEQ ID NO: 420; and iv) SEQ ID NO:859. In some cases, the cassette is operably linked to a promoter that is functional in a eukaryotic cell. In some cases, the cassette is operably linked to an RNA polymerase II promoter. In some cases, the cassette is operably linked to an RNA polymerase III promoter. In some cases, the cassette is operably linked to a CAG promoter. In some cases, the cassette is operably linked to a CBA promoter. In some cases, the cassette is operably linked to a CMV promoter. In some cases, the cassette is operably linked to a U6 promoter. In some cases, the cassette is operably linked to an EF1α promoter. In some cases, the cassette is operably linked to an H1 promoter. In some cases, the recombinant expression vector comprises a 5′ AAV ITR sequence and a 3′ AAV ITR sequence. In some cases, the AAV ITRs are AAV9 ITRs. In some cases, the AAV ITRs are AAV2 ITRs.
45) In some cases, a recombinant expression vector comprises one of the following cassettes. In some cases, a cassette comprises, in order from 5′ to 3′: i) SEQ ID NO:854; ii) SEQ ID NO:421; iii) a sequence that is complementary to SEQ ID NO: 421, where the sequence can comprise from 0 to 10 mismatches (non-complementary nucleotides) to SEQ ID NO: 421; and iv) SEQ ID NO:855. In some cases, a cassette comprises, in order from 5′ to 3′: i) SEQ ID NO:856; ii) SEQ ID NO: 421; iii) a sequence that is complementary to SEQ ID NO: 421, where the sequence can comprise from 0 to 10 mismatches (non-complementary nucleotides) to SEQ ID NO: 421; and iv) SEQ ID NO: 857. In some cases, a cassette comprises, in order from 5′ to 3′: i) SEQ ID NO:858; ii) SEQ ID NO: 421; iii) a sequence that is complementary to SEQ ID NO: 421, where the sequence can comprise from 0 to 10 mismatches (non-complementary nucleotides) to SEQ ID NO: 421; and iv) SEQ ID NO:859. In some cases, the cassette is operably linked to a promoter that is functional in a eukaryotic cell. In some cases, the cassette is operably linked to an RNA polymerase II promoter. In some cases, the cassette is operably linked to an RNA polymerase III promoter. In some cases, the cassette is operably linked to a CAG promoter. In some cases, the cassette is operably linked to a CBA promoter. In some cases, the cassette is operably linked to a CMV promoter. In some cases, the cassette is operably linked to a U6 promoter. In some cases, the cassette is operably linked to an EF1α promoter. In some cases, the cassette is operably linked to an H1 promoter. In some cases, the recombinant expression vector comprises a 5′ AAV ITR sequence and a 3′ AAV ITR sequence. In some cases, the AAV ITRs are AAV9 ITRs. In some cases, the AAV ITRs are AAV2 ITRs.
46) In some cases, a recombinant expression vector comprises one of the following cassettes. In some cases, a cassette comprises, in order from 5′ to 3′: i) SEQ ID NO:854; ii) SEQ ID NO:422; iii) a sequence that is complementary to SEQ ID NO: 422, where the sequence can comprise from 0 to 10 mismatches (non-complementary nucleotides) to SEQ ID NO: 422; and iv) SEQ ID NO:855. In some cases, a cassette comprises, in order from 5′ to 3′: i) SEQ ID NO:856; ii) SEQ ID NO: 422; iii) a sequence that is complementary to SEQ ID NO: 422, where the sequence can comprise from 0 to 10 mismatches (non-complementary nucleotides) to SEQ ID NO: 422; and iv) SEQ ID NO: 857. In some cases, a cassette comprises, in order from 5′ to 3′: i) SEQ ID NO:858; ii) SEQ ID NO: 422; iii) a sequence that is complementary to SEQ ID NO: 422, where the sequence can comprise from 0 to 10 mismatches (non-complementary nucleotides) to SEQ ID NO: 422; and iv) SEQ ID NO:859. In some cases, the cassette is operably linked to a promoter that is functional in a eukaryotic cell. In some cases, the cassette is operably linked to an RNA polymerase II promoter. In some cases, the cassette is operably linked to an RNA polymerase III promoter. In some cases, the cassette is operably linked to a CAG promoter. In some cases, the cassette is operably linked to a CBA promoter. In some cases, the cassette is operably linked to a CMV promoter. In some cases, the cassette is operably linked to a U6 promoter. In some cases, the cassette is operably linked to an EF1α promoter. In some cases, the cassette is operably linked to an H1 promoter. In some cases, the recombinant expression vector comprises a 5′ AAV ITR sequence and a 3′ AAV ITR sequence. In some cases, the AAV ITRs are AAV9 ITRs. In some cases, the AAV ITRs are AAV2 ITRs.
47) In some cases, a recombinant expression vector comprises one of the following cassettes. In some cases, a cassette comprises, in order from 5′ to 3′: i) SEQ ID NO:854; ii) SEQ ID NO:423; iii) a sequence that is complementary to SEQ ID NO: 423, where the sequence can comprise from 0 to 10 mismatches (non-complementary nucleotides) to SEQ ID NO: 423; and iv) SEQ ID NO:855. In some cases, a cassette comprises, in order from 5′ to 3′: i) SEQ ID NO:856; ii) SEQ ID NO: 423; iii) a sequence that is complementary to SEQ ID NO: 423, where the sequence can comprise from 0 to 10 mismatches (non-complementary nucleotides) to SEQ ID NO: 423; and iv) SEQ ID NO: 857. In some cases, a cassette comprises, in order from 5′ to 3′: i) SEQ ID NO:858; ii) SEQ ID NO: 423; iii) a sequence that is complementary to SEQ ID NO: 423, where the sequence can comprise from 0 to 10 mismatches (non-complementary nucleotides) to SEQ ID NO: 423; and iv) SEQ ID NO:859. In some cases, the cassette is operably linked to a promoter that is functional in a eukaryotic cell. In some cases, the cassette is operably linked to an RNA polymerase II promoter. In some cases, the cassette is operably linked to an RNA polymerase III promoter. In some cases, the cassette is operably linked to a CAG promoter. In some cases, the cassette is operably linked to a CBA promoter. In some cases, the cassette is operably linked to a CMV promoter. In some cases, the cassette is operably linked to a U6 promoter. In some cases, the cassette is operably linked to an EF1α promoter. In some cases, the cassette is operably linked to an H1 promoter. In some cases, the recombinant expression vector comprises a 5′ AAV ITR sequence and a 3′ AAV ITR sequence. In some cases, the AAV ITRs are AAV9 ITRs. In some cases, the AAV ITRs are AAV2 ITRs.
48) In some cases, a recombinant expression vector comprises one of the following cassettes. In some cases, a cassette comprises, in order from 5′ to 3′: i) SEQ ID NO:854; ii) SEQ ID NO:424; iii) a sequence that is complementary to SEQ ID NO: 424, where the sequence can comprise from 0 to 10 mismatches (non-complementary nucleotides) to SEQ ID NO: 424; and iv) SEQ ID NO:855. In some cases, a cassette comprises, in order from 5′ to 3′: i) SEQ ID NO:856; ii) SEQ ID NO: 424; iii) a sequence that is complementary to SEQ ID NO: 424, where the sequence can comprise from 0 to 10 mismatches (non-complementary nucleotides) to SEQ ID NO: 424; and iv) SEQ ID NO: 857. In some cases, a cassette comprises, in order from 5′ to 3′: i) SEQ ID NO:858; ii) SEQ ID NO: 424; iii) a sequence that is complementary to SEQ ID NO: 424, where the sequence can comprise from 0 to 10 mismatches (non-complementary nucleotides) to SEQ ID NO: 424; and iv) SEQ ID NO:859. In some cases, the cassette is operably linked to a promoter that is functional in a eukaryotic cell. In some cases, the cassette is operably linked to an RNA polymerase II promoter. In some cases, the cassette is operably linked to an RNA polymerase III promoter. In some cases, the cassette is operably linked to a CAG promoter. In some cases, the cassette is operably linked to a CBA promoter. In some cases, the cassette is operably linked to a CMV promoter. In some cases, the cassette is operably linked to a U6 promoter. In some cases, the cassette is operably linked to an EF1α promoter. In some cases, the cassette is operably linked to an H1 promoter. In some cases, the recombinant expression vector comprises a 5′ AAV ITR sequence and a 3′ AAV ITR sequence. In some cases, the AAV ITRs are AAV9 ITRs. In some cases, the AAV ITRs are AAV2 ITRs.
49) In some cases, a recombinant expression vector comprises one of the following cassettes. In some cases, a cassette comprises, in order from 5′ to 3′: i) SEQ ID NO:854; ii) SEQ ID NO:425; iii) a sequence that is complementary to SEQ ID NO: 425, where the sequence can comprise from 0 to 10 mismatches (non-complementary nucleotides) to SEQ ID NO: 425; and iv) SEQ ID NO:855. In some cases, a cassette comprises, in order from 5′ to 3′: i) SEQ ID NO:856; ii) SEQ ID NO: 425; iii) a sequence that is complementary to SEQ ID NO: 425, where the sequence can comprise from 0 to 10 mismatches (non-complementary nucleotides) to SEQ ID NO: 425; and iv) SEQ ID NO: 857. In some cases, a cassette comprises, in order from 5′ to 3′: i) SEQ ID NO:858; ii) SEQ ID NO: 425; iii) a sequence that is complementary to SEQ ID NO: 425, where the sequence can comprise from 0 to 10 mismatches (non-complementary nucleotides) to SEQ ID NO: 425; and iv) SEQ ID NO:859. In some cases, the cassette is operably linked to a promoter that is functional in a eukaryotic cell. In some cases, the cassette is operably linked to an RNA polymerase II promoter. In some cases, the cassette is operably linked to an RNA polymerase III promoter. In some cases, the cassette is operably linked to a CAG promoter. In some cases, the cassette is operably linked to a CBA promoter. In some cases, the cassette is operably linked to a CMV promoter. In some cases, the cassette is operably linked to a U6 promoter. In some cases, the cassette is operably linked to an EF1α promoter. In some cases, the cassette is operably linked to an H1 promoter. In some cases, the recombinant expression vector comprises a 5′ AAV ITR sequence and a 3′ AAV ITR sequence. In some cases, the AAV ITRs are AAV9 ITRs. In some cases, the AAV ITRs are AAV2 ITRs.
50) In some cases, a recombinant expression vector comprises one of the following cassettes. In some cases, a cassette comprises, in order from 5′ to 3′: i) SEQ ID NO:854; ii) SEQ ID NO:426; iii) a sequence that is complementary to SEQ ID NO: 426, where the sequence can comprise from 0 to 10 mismatches (non-complementary nucleotides) to SEQ ID NO: 426; and iv) SEQ ID NO:855. In some cases, a cassette comprises, in order from 5′ to 3′: i) SEQ ID NO:856; ii) SEQ ID NO: 426; iii) a sequence that is complementary to SEQ ID NO: 426, where the sequence can comprise from 0 to 10 mismatches (non-complementary nucleotides) to SEQ ID NO: 426; and iv) SEQ ID NO: 857. In some cases, a cassette comprises, in order from 5′ to 3′: i) SEQ ID NO:858; ii) SEQ ID NO: 426; iii) a sequence that is complementary to SEQ ID NO: 426, where the sequence can comprise from 0 to 10 mismatches (non-complementary nucleotides) to SEQ ID NO: 426; and iv) SEQ ID NO:859. In some cases, the cassette is operably linked to a promoter that is functional in a eukaryotic cell. In some cases, the cassette is operably linked to an RNA polymerase II promoter. In some cases, the cassette is operably linked to an RNA polymerase III promoter. In some cases, the cassette is operably linked to a CAG promoter. In some cases, the cassette is operably linked to a CBA promoter. In some cases, the cassette is operably linked to a CMV promoter. In some cases, the cassette is operably linked to a U6 promoter. In some cases, the cassette is operably linked to an EF1α promoter. In some cases, the cassette is operably linked to an H1 promoter. In some cases, the recombinant expression vector comprises a 5′ AAV ITR sequence and a 3′ AAV ITR sequence. In some cases, the AAV ITRs are AAV9 ITRs. In some cases, the AAV ITRs are AAV2 ITRs. 51) In some cases, a recombinant expression vector comprises one of the following cassettes. In some cases, a cassette comprises, in order from 5′ to 3′: i) SEQ ID NO:854; ii) SEQ ID NO:427; iii) a sequence that is complementary to SEQ ID NO: 427, where the sequence can comprise from 0 to 10 mismatches (non-complementary nucleotides) to SEQ ID NO: 427; and iv) SEQ ID NO:855. In some cases, a cassette comprises, in order from 5′ to 3′: i) SEQ ID NO:856; ii) SEQ ID NO: 427; iii) a sequence that is complementary to SEQ ID NO: 427, where the sequence can comprise from 0 to 10 mismatches (non-complementary nucleotides) to SEQ ID NO: 427; and iv) SEQ ID NO: 857. In some cases, a cassette comprises, in order from 5′ to 3′: i) SEQ ID NO:858; ii) SEQ ID NO: 427; iii) a sequence that is complementary to SEQ ID NO: 427, where the sequence can comprise from 0 to 10 mismatches (non-complementary nucleotides) to SEQ ID NO: 427; and iv) SEQ ID NO:859. In some cases, the cassette is operably linked to a promoter that is functional in a eukaryotic cell. In some cases, the cassette is operably linked to an RNA polymerase II promoter. In some cases, the cassette is operably linked to an RNA polymerase III promoter. In some cases, the cassette is operably linked to a CAG promoter. In some cases, the cassette is operably linked to a CBA promoter. In some cases, the cassette is operably linked to a CMV promoter. In some cases, the cassette is operably linked to a U6 promoter. In some cases, the cassette is operably linked to an EF1α promoter. In some cases, the cassette is operably linked to an H1 promoter. In some cases, the recombinant expression vector comprises a 5′ AAV ITR sequence and a 3′ AAV ITR sequence. In some cases, the AAV ITRs are AAV9 ITRs. In some cases, the AAV ITRs are AAV2 ITRs.
52) In some cases, a recombinant expression vector comprises one of the following cassettes. In some cases, a cassette comprises, in order from 5′ to 3′: i) SEQ ID NO:854; ii) SEQ ID NO:428; iii) a sequence that is complementary to SEQ ID NO: 428, where the sequence can comprise from 0 to 10 mismatches (non-complementary nucleotides) to SEQ ID NO: 428; and iv) SEQ ID NO:855. In some cases, a cassette comprises, in order from 5′ to 3′: i) SEQ ID NO:856; ii) SEQ ID NO: 428; iii) a sequence that is complementary to SEQ ID NO: 428, where the sequence can comprise from 0 to 10 mismatches (non-complementary nucleotides) to SEQ ID NO: 428; and iv) SEQ ID NO: 857. In some cases, a cassette comprises, in order from 5′ to 3′: i) SEQ ID NO:858; ii) SEQ ID NO: 428; iii) a sequence that is complementary to SEQ ID NO: 428, where the sequence can comprise from 0 to 10 mismatches (non-complementary nucleotides) to SEQ ID NO: 428; and iv) SEQ ID NO:859. In some cases, the cassette is operably linked to a promoter that is functional in a eukaryotic cell. In some cases, the cassette is operably linked to an RNA polymerase II promoter. In some cases, the cassette is operably linked to an RNA polymerase III promoter. In some cases, the cassette is operably linked to a CAG promoter. In some cases, the cassette is operably linked to a CBA promoter. In some cases, the cassette is operably linked to a CMV promoter. In some cases, the cassette is operably linked to a U6 promoter. In some cases, the cassette is operably linked to an EF1α promoter. In some cases, the cassette is operably linked to an H1 promoter. In some cases, the recombinant expression vector comprises a 5′ AAV ITR sequence and a 3′ AAV ITR sequence. In some cases, the AAV ITRs are AAV9 ITRs. In some cases, the AAV ITRs are AAV2 ITRs.
53) In some cases, a recombinant expression vector comprises one of the following cassettes. In some cases, a cassette comprises, in order from 5′ to 3′: i) SEQ ID NO:854; ii) SEQ ID NO:429; iii) a sequence that is complementary to SEQ ID NO: 429, where the sequence can comprise from 0 to 10 mismatches (non-complementary nucleotides) to SEQ ID NO: 429; and iv) SEQ ID NO:855. In some cases, a cassette comprises, in order from 5′ to 3′: i) SEQ ID NO:856; ii) SEQ ID NO: 429; iii) a sequence that is complementary to SEQ ID NO: 429, where the sequence can comprise from 0 to 10 mismatches (non-complementary nucleotides) to SEQ ID NO: 429; and iv) SEQ ID NO: 857. In some cases, a cassette comprises, in order from 5′ to 3′: i) SEQ ID NO:858; ii) SEQ ID NO: 429; iii) a sequence that is complementary to SEQ ID NO: 429, where the sequence can comprise from 0 to 10 mismatches (non-complementary nucleotides) to SEQ ID NO: 429; and iv) SEQ ID NO:859. In some cases, the cassette is operably linked to a promoter that is functional in a eukaryotic cell. In some cases, the cassette is operably linked to an RNA polymerase II promoter. In some cases, the cassette is operably linked to an RNA polymerase III promoter. In some cases, the cassette is operably linked to a CAG promoter. In some cases, the cassette is operably linked to a CBA promoter. In some cases, the cassette is operably linked to a CMV promoter. In some cases, the cassette is operably linked to a U6 promoter. In some cases, the cassette is operably linked to an EF1α promoter. In some cases, the cassette is operably linked to an H1 promoter. In some cases, the recombinant expression vector comprises a 5′ AAV ITR sequence and a 3′ AAV ITR sequence. In some cases, the AAV ITRs are AAV9 ITRs. In some cases, the AAV ITRs are AAV2 ITRs.
54) In some cases, a recombinant expression vector comprises one of the following cassettes. In some cases, a cassette comprises, in order from 5′ to 3′: i) SEQ ID NO:854; ii) SEQ ID NO:430; iii) a sequence that is complementary to SEQ ID NO: 430, where the sequence can comprise from 0 to 10 mismatches (non-complementary nucleotides) to SEQ ID NO: 430; and iv) SEQ ID NO:855. In some cases, a cassette comprises, in order from 5′ to 3′: i) SEQ ID NO:856; ii) SEQ ID NO: 430; iii) a sequence that is complementary to SEQ ID NO: 430, where the sequence can comprise from 0 to 10 mismatches (non-complementary nucleotides) to SEQ ID NO: 430; and iv) SEQ ID NO: 857. In some cases, a cassette comprises, in order from 5′ to 3′: i) SEQ ID NO:858; ii) SEQ ID NO: 430; iii) a sequence that is complementary to SEQ ID NO: 430, where the sequence can comprise from 0 to 10 mismatches (non-complementary nucleotides) to SEQ ID NO: 430; and iv) SEQ ID NO:859. In some cases, the cassette is operably linked to a promoter that is functional in a eukaryotic cell. In some cases, the cassette is operably linked to an RNA polymerase II promoter. In some cases, the cassette is operably linked to an RNA polymerase III promoter. In some cases, the cassette is operably linked to a CAG promoter. In some cases, the cassette is operably linked to a CBA promoter. In some cases, the cassette is operably linked to a CMV promoter. In some cases, the cassette is operably linked to a U6 promoter. In some cases, the cassette is operably linked to an EF1α promoter. In some cases, the cassette is operably linked to an H1 promoter. In some cases, the recombinant expression vector comprises a 5′ AAV ITR sequence and a 3′ AAV ITR sequence. In some cases, the AAV ITRs are AAV9 ITRs. In some cases, the AAV ITRs are AAV2 ITRs.
55) In some cases, a recombinant expression vector comprises one of the following cassettes. In some cases, a cassette comprises, in order from 5′ to 3′: i) SEQ ID NO:854; ii) SEQ ID NO:431; iii) a sequence that is complementary to SEQ ID NO: 431, where the sequence can comprise from 0 to 10 mismatches (non-complementary nucleotides) to SEQ ID NO: 431; and iv) SEQ ID NO:855. In some cases, a cassette comprises, in order from 5′ to 3′: i) SEQ ID NO:856; ii) SEQ ID NO: 431; iii) a sequence that is complementary to SEQ ID NO: 431, where the sequence can comprise from 0 to 10 mismatches (non-complementary nucleotides) to SEQ ID NO: 431; and iv) SEQ ID NO: 857. In some cases, a cassette comprises, in order from 5′ to 3′: i) SEQ ID NO:858; ii) SEQ ID NO: 431; iii) a sequence that is complementary to SEQ ID NO: 431, where the sequence can comprise from 0 to 10 mismatches (non-complementary nucleotides) to SEQ ID NO: 431; and iv) SEQ ID NO:859. In some cases, the cassette is operably linked to a promoter that is functional in a eukaryotic cell. In some cases, the cassette is operably linked to an RNA polymerase II promoter. In some cases, the cassette is operably linked to an RNA polymerase III promoter. In some cases, the cassette is operably linked to a CAG promoter. In some cases, the cassette is operably linked to a CBA promoter. In some cases, the cassette is operably linked to a CMV promoter. In some cases, the cassette is operably linked to a U6 promoter. In some cases, the cassette is operably linked to an EF1α promoter. In some cases, the cassette is operably linked to an H1 promoter. In some cases, the recombinant expression vector comprises a 5′ AAV ITR sequence and a 3′ AAV ITR sequence. In some cases, the AAV ITRs are AAV9 ITRs. In some cases, the AAV ITRs are AAV2 ITRs.
56) In some cases, a recombinant expression vector comprises one of the following cassettes. In some cases, a cassette comprises, in order from 5′ to 3′: i) SEQ ID NO:854; ii) SEQ ID NO:432; iii) a sequence that is complementary to SEQ ID NO: 432, where the sequence can comprise from 0 to 10 mismatches (non-complementary nucleotides) to SEQ ID NO: 432; and iv) SEQ ID NO:855. In some cases, a cassette comprises, in order from 5′ to 3′: i) SEQ ID NO:856; ii) SEQ ID NO: 432; iii) a sequence that is complementary to SEQ ID NO: 432, where the sequence can comprise from 0 to 10 mismatches (non-complementary nucleotides) to SEQ ID NO: 432; and iv) SEQ ID NO: 857. In some cases, a cassette comprises, in order from 5′ to 3′: i) SEQ ID NO:858; ii) SEQ ID NO: 432; iii) a sequence that is complementary to SEQ ID NO: 432, where the sequence can comprise from 0 to 10 mismatches (non-complementary nucleotides) to SEQ ID NO: 432; and iv) SEQ ID NO:859. In some cases, the cassette is operably linked to a promoter that is functional in a eukaryotic cell. In some cases, the cassette is operably linked to an RNA polymerase II promoter. In some cases, the cassette is operably linked to an RNA polymerase III promoter. In some cases, the cassette is operably linked to a CAG promoter. In some cases, the cassette is operably linked to a CBA promoter. In some cases, the cassette is operably linked to a CMV promoter. In some cases, the cassette is operably linked to a U6 promoter. In some cases, the cassette is operably linked to an EF1α promoter. In some cases, the cassette is operably linked to an H1 promoter. In some cases, the recombinant expression vector comprises a 5′ AAV ITR sequence and a 3′ AAV ITR sequence. In some cases, the AAV ITRs are AAV9 ITRs. In some cases, the AAV ITRs are AAV2 ITRs.
57) In some cases, a recombinant expression vector comprises one of the following cassettes. In some cases, a cassette comprises, in order from 5′ to 3′: i) SEQ ID NO:854; ii) SEQ ID NO:433; iii) a sequence that is complementary to SEQ ID NO: 433, where the sequence can comprise from 0 to 10 mismatches (non-complementary nucleotides) to SEQ ID NO: 433; and iv) SEQ ID NO:855. In some cases, a cassette comprises, in order from 5′ to 3′: i) SEQ ID NO:856; ii) SEQ ID NO: 433; iii) a sequence that is complementary to SEQ ID NO: 433, where the sequence can comprise from 0 to 10 mismatches (non-complementary nucleotides) to SEQ ID NO: 433; and iv) SEQ ID NO: 857. In some cases, a cassette comprises, in order from 5′ to 3′: i) SEQ ID NO:858; ii) SEQ ID NO: 433; iii) a sequence that is complementary to SEQ ID NO: 433, where the sequence can comprise from 0 to 10 mismatches (non-complementary nucleotides) to SEQ ID NO: 433; and iv) SEQ ID NO:859. In some cases, the cassette is operably linked to a promoter that is functional in a eukaryotic cell. In some cases, the cassette is operably linked to an RNA polymerase II promoter. In some cases, the cassette is operably linked to an RNA polymerase III promoter. In some cases, the cassette is operably linked to a CAG promoter. In some cases, the cassette is operably linked to a CBA promoter. In some cases, the cassette is operably linked to a CMV promoter. In some cases, the cassette is operably linked to a U6 promoter. In some cases, the cassette is operably linked to an EF1α promoter. In some cases, the cassette is operably linked to an H1 promoter. In some cases, the recombinant expression vector comprises a 5′ AAV ITR sequence and a 3′ AAV ITR sequence. In some cases, the AAV ITRs are AAV9 ITRs. In some cases, the AAV ITRs are AAV2 ITRs.
58) In some cases, a recombinant expression vector comprises one of the following cassettes. In some cases, a cassette comprises, in order from 5′ to 3′: i) SEQ ID NO:854; ii) SEQ ID NO:434; iii) a sequence that is complementary to SEQ ID NO: 434, where the sequence can comprise from 0 to 10 mismatches (non-complementary nucleotides) to SEQ ID NO: 434; and iv) SEQ ID NO:855. In some cases, a cassette comprises, in order from 5′ to 3′: i) SEQ ID NO:856; ii) SEQ ID NO: 434; iii) a sequence that is complementary to SEQ ID NO: 434, where the sequence can comprise from 0 to 10 mismatches (non-complementary nucleotides) to SEQ ID NO: 434; and iv) SEQ ID NO: 857. In some cases, a cassette comprises, in order from 5′ to 3′: i) SEQ ID NO:858; ii) SEQ ID NO: 434; iii) a sequence that is complementary to SEQ ID NO: 434, where the sequence can comprise from 0 to 10 mismatches (non-complementary nucleotides) to SEQ ID NO: 434; and iv) SEQ ID NO:859. In some cases, the cassette is operably linked to a promoter that is functional in a eukaryotic cell. In some cases, the cassette is operably linked to an RNA polymerase II promoter. In some cases, the cassette is operably linked to an RNA polymerase III promoter. In some cases, the cassette is operably linked to a CAG promoter. In some cases, the cassette is operably linked to a CBA promoter. In some cases, the cassette is operably linked to a CMV promoter. In some cases, the cassette is operably linked to a U6 promoter. In some cases, the cassette is operably linked to an EF1α promoter. In some cases, the cassette is operably linked to an H1 promoter. In some cases, the recombinant expression vector comprises a 5′ AAV ITR sequence and a 3′ AAV ITR sequence. In some cases, the AAV ITRs are AAV9 ITRs. In some cases, the AAV ITRs are AAV2 ITRs.
59) In some cases, a recombinant expression vector comprises one of the following cassettes. In some cases, a cassette comprises, in order from 5′ to 3′: i) SEQ ID NO:854; ii) SEQ ID NO:435; iii) a sequence that is complementary to SEQ ID NO: 435, where the sequence can comprise from 0 to 10 mismatches (non-complementary nucleotides) to SEQ ID NO: 435; and iv) SEQ ID NO:855. In some cases, a cassette comprises, in order from 5′ to 3′: i) SEQ ID NO:856; ii) SEQ ID NO: 435; iii) a sequence that is complementary to SEQ ID NO: 435, where the sequence can comprise from 0 to 10 mismatches (non-complementary nucleotides) to SEQ ID NO: 435; and iv) SEQ ID NO: 857. In some cases, a cassette comprises, in order from 5′ to 3′: i) SEQ ID NO:858; ii) SEQ ID NO: 435; iii) a sequence that is complementary to SEQ ID NO: 435, where the sequence can comprise from 0 to 10 mismatches (non-complementary nucleotides) to SEQ ID NO: 435; and iv) SEQ ID NO:859. In some cases, the cassette is operably linked to a promoter that is functional in a eukaryotic cell. In some cases, the cassette is operably linked to an RNA polymerase II promoter. In some cases, the cassette is operably linked to an RNA polymerase III promoter. In some cases, the cassette is operably linked to a CAG promoter. In some cases, the cassette is operably linked to a CBA promoter. In some cases, the cassette is operably linked to a CMV promoter. In some cases, the cassette is operably linked to a U6 promoter. In some cases, the cassette is operably linked to an EF1α promoter. In some cases, the cassette is operably linked to an H1 promoter. In some cases, the recombinant expression vector comprises a 5′ AAV ITR sequence and a 3′ AAV ITR sequence. In some cases, the AAV ITRs are AAV9 ITRs. In some cases, the AAV ITRs are AAV2 ITRs.
60) In some cases, a recombinant expression vector comprises one of the following cassettes. In some cases, a cassette comprises, in order from 5′ to 3′: i) SEQ ID NO:854; ii) SEQ ID NO:436; iii) a sequence that is complementary to SEQ ID NO: 436, where the sequence can comprise from 0 to 10 mismatches (non-complementary nucleotides) to SEQ ID NO: 436; and iv) SEQ ID NO:855. In some cases, a cassette comprises, in order from 5′ to 3′: i) SEQ ID NO:856; ii) SEQ ID NO: 436; iii) a sequence that is complementary to SEQ ID NO: 436, where the sequence can comprise from 0 to 10 mismatches (non-complementary nucleotides) to SEQ ID NO: 436; and iv) SEQ ID NO: 857. In some cases, a cassette comprises, in order from 5′ to 3′: i) SEQ ID NO:858; ii) SEQ ID NO: 436; iii) a sequence that is complementary to SEQ ID NO: 436, where the sequence can comprise from 0 to 10 mismatches (non-complementary nucleotides) to SEQ ID NO: 436; and iv) SEQ ID NO:859. In some cases, the cassette is operably linked to a promoter that is functional in a eukaryotic cell. In some cases, the cassette is operably linked to an RNA polymerase II promoter. In some cases, the cassette is operably linked to an RNA polymerase III promoter. In some cases, the cassette is operably linked to a CAG promoter. In some cases, the cassette is operably linked to a CBA promoter. In some cases, the cassette is operably linked to a CMV promoter. In some cases, the cassette is operably linked to a U6 promoter. In some cases, the cassette is operably linked to an EF1α promoter. In some cases, the cassette is operably linked to an H1 promoter. In some cases, the recombinant expression vector comprises a 5′ AAV ITR sequence and a 3′ AAV ITR sequence. In some cases, the AAV ITRs are AAV9 ITRs. In some cases, the AAV ITRs are AAV2 ITRs.
61) In some cases, a recombinant expression vector comprises one of the following cassettes. In some cases, a cassette comprises, in order from 5′ to 3′: i) SEQ ID NO:854; ii) SEQ ID NO:437; iii) a sequence that is complementary to SEQ ID NO: 437, where the sequence can comprise from 0 to 10 mismatches (non-complementary nucleotides) to SEQ ID NO: 437; and iv) SEQ ID NO:855. In some cases, a cassette comprises, in order from 5′ to 3′: i) SEQ ID NO:856; ii) SEQ ID NO: 437; iii) a sequence that is complementary to SEQ ID NO: 437, where the sequence can comprise from 0 to 10 mismatches (non-complementary nucleotides) to SEQ ID NO: 437; and iv) SEQ ID NO: 857. In some cases, a cassette comprises, in order from 5′ to 3′: i) SEQ ID NO:858; ii) SEQ ID NO: 437; iii) a sequence that is complementary to SEQ ID NO: 437, where the sequence can comprise from 0 to 10 mismatches (non-complementary nucleotides) to SEQ ID NO: 437; and iv) SEQ ID NO:859. In some cases, the cassette is operably linked to a promoter that is functional in a eukaryotic cell. In some cases, the cassette is operably linked to an RNA polymerase II promoter. In some cases, the cassette is operably linked to an RNA polymerase III promoter. In some cases, the cassette is operably linked to a CAG promoter. In some cases, the cassette is operably linked to a CBA promoter. In some cases, the cassette is operably linked to a CMV promoter. In some cases, the cassette is operably linked to a U6 promoter. In some cases, the cassette is operably linked to an EF1α promoter. In some cases, the cassette is operably linked to an H1 promoter. In some cases, the recombinant expression vector comprises a 5′ AAV ITR sequence and a 3′ AAV ITR sequence. In some cases, the AAV ITRs are AAV9 ITRs. In some cases, the AAV ITRs are AAV2 ITRs.
62) In some cases, a recombinant expression vector comprises one of the following cassettes. In some cases, a cassette comprises, in order from 5′ to 3′: i) SEQ ID NO:854; ii) SEQ ID NO:438; iii) a sequence that is complementary to SEQ ID NO: 438, where the sequence can comprise from 0 to 10 mismatches (non-complementary nucleotides) to SEQ ID NO: 438; and iv) SEQ ID NO:855. In some cases, a cassette comprises, in order from 5′ to 3′: i) SEQ ID NO:856; ii) SEQ ID NO: 438; iii) a sequence that is complementary to SEQ ID NO: 438, where the sequence can comprise from 0 to 10 mismatches (non-complementary nucleotides) to SEQ ID NO: 438; and iv) SEQ ID NO: 857. In some cases, a cassette comprises, in order from 5′ to 3′: i) SEQ ID NO:858; ii) SEQ ID NO: 438; iii) a sequence that is complementary to SEQ ID NO: 438, where the sequence can comprise from 0 to 10 mismatches (non-complementary nucleotides) to SEQ ID NO: 438; and iv) SEQ ID NO:859. In some cases, the cassette is operably linked to a promoter that is functional in a eukaryotic cell. In some cases, the cassette is operably linked to an RNA polymerase II promoter. In some cases, the cassette is operably linked to an RNA polymerase III promoter. In some cases, the cassette is operably linked to a CAG promoter. In some cases, the cassette is operably linked to a CBA promoter. In some cases, the cassette is operably linked to a CMV promoter. In some cases, the cassette is operably linked to a U6 promoter. In some cases, the cassette is operably linked to an EF1α promoter. In some cases, the cassette is operably linked to an H1 promoter. In some cases, the recombinant expression vector comprises a 5′ AAV ITR sequence and a 3′ AAV ITR sequence. In some cases, the AAV ITRs are AAV9 ITRs. In some cases, the AAV ITRs are AAV2 ITRs.
63) In some cases, a recombinant expression vector comprises one of the following cassettes. In some cases, a cassette comprises, in order from 5′ to 3′: i) SEQ ID NO:854; ii) SEQ ID NO:439; iii) a sequence that is complementary to SEQ ID NO: 439, where the sequence can comprise from 0 to 10 mismatches (non-complementary nucleotides) to SEQ ID NO: 439; and iv) SEQ ID NO:855. In some cases, a cassette comprises, in order from 5′ to 3′: i) SEQ ID NO:856; ii) SEQ ID NO: 439; iii) a sequence that is complementary to SEQ ID NO: 439, where the sequence can comprise from 0 to 10 mismatches (non-complementary nucleotides) to SEQ ID NO: 439; and iv) SEQ ID NO: 857. In some cases, a cassette comprises, in order from 5′ to 3′: i) SEQ ID NO:858; ii) SEQ ID NO: 439; iii) a sequence that is complementary to SEQ ID NO: 439, where the sequence can comprise from 0 to 10 mismatches (non-complementary nucleotides) to SEQ ID NO: 439; and iv) SEQ ID NO:859. In some cases, the cassette is operably linked to a promoter that is functional in a eukaryotic cell. In some cases, the cassette is operably linked to an RNA polymerase II promoter. In some cases, the cassette is operably linked to an RNA polymerase III promoter. In some cases, the cassette is operably linked to a CAG promoter. In some cases, the cassette is operably linked to a CBA promoter. In some cases, the cassette is operably linked to a CMV promoter. In some cases, the cassette is operably linked to a U6 promoter. In some cases, the cassette is operably linked to an EF1α promoter. In some cases, the cassette is operably linked to an H1 promoter. In some cases, the recombinant expression vector comprises a 5′ AAV ITR sequence and a 3′ AAV ITR sequence. In some cases, the AAV ITRs are AAV9 ITRs. In some cases, the AAV ITRs are AAV2 ITRs.
64) In some cases, a recombinant expression vector comprises one of the following cassettes. In some cases, a cassette comprises, in order from 5′ to 3′: i) SEQ ID NO:854; ii) SEQ ID NO:440; iii) a sequence that is complementary to SEQ ID NO: 440, where the sequence can comprise from 0 to 10 mismatches (non-complementary nucleotides) to SEQ ID NO: 440; and iv) SEQ ID NO:855. In some cases, a cassette comprises, in order from 5′ to 3′: i) SEQ ID NO:856; ii) SEQ ID NO: 440; iii) a sequence that is complementary to SEQ ID NO: 440, where the sequence can comprise from 0 to 10 mismatches (non-complementary nucleotides) to SEQ ID NO: 440; and iv) SEQ ID NO: 857. In some cases, a cassette comprises, in order from 5′ to 3′: i) SEQ ID NO:858; ii) SEQ ID NO: 440; iii) a sequence that is complementary to SEQ ID NO: 440, where the sequence can comprise from 0 to 10 mismatches (non-complementary nucleotides) to SEQ ID NO: 440; and iv) SEQ ID NO:859. In some cases, the cassette is operably linked to a promoter that is functional in a eukaryotic cell. In some cases, the cassette is operably linked to an RNA polymerase II promoter. In some cases, the cassette is operably linked to an RNA polymerase III promoter. In some cases, the cassette is operably linked to a CAG promoter. In some cases, the cassette is operably linked to a CBA promoter. In some cases, the cassette is operably linked to a CMV promoter. In some cases, the cassette is operably linked to a U6 promoter. In some cases, the cassette is operably linked to an EF1α promoter. In some cases, the cassette is operably linked to an H1 promoter. In some cases, the recombinant expression vector comprises a 5′ AAV ITR sequence and a 3′ AAV ITR sequence. In some cases, the AAV ITRs are AAV9 ITRs. In some cases, the AAV ITRs are AAV2 ITRs.
65) In some cases, a recombinant expression vector comprises one of the following cassettes. In some cases, a cassette comprises, in order from 5′ to 3′: i) SEQ ID NO:854; ii) SEQ ID NO:441; iii) a sequence that is complementary to SEQ ID NO: 441, where the sequence can comprise from 0 to 10 mismatches (non-complementary nucleotides) to SEQ ID NO: 441; and iv) SEQ ID NO:855. In some cases, a cassette comprises, in order from 5′ to 3′: i) SEQ ID NO:856; ii) SEQ ID NO: 441; iii) a sequence that is complementary to SEQ ID NO: 441, where the sequence can comprise from 0 to 10 mismatches (non-complementary nucleotides) to SEQ ID NO: 441; and iv) SEQ ID NO: 857. In some cases, a cassette comprises, in order from 5′ to 3′: i) SEQ ID NO:858; ii) SEQ ID NO: 441; iii) a sequence that is complementary to SEQ ID NO: 441, where the sequence can comprise from 0 to 10 mismatches (non-complementary nucleotides) to SEQ ID NO: 441; and iv) SEQ ID NO:859. In some cases, the cassette is operably linked to a promoter that is functional in a eukaryotic cell. In some cases, the cassette is operably linked to an RNA polymerase II promoter. In some cases, the cassette is operably linked to an RNA polymerase III promoter. In some cases, the cassette is operably linked to a CAG promoter. In some cases, the cassette is operably linked to a CBA promoter. In some cases, the cassette is operably linked to a CMV promoter. In some cases, the cassette is operably linked to a U6 promoter. In some cases, the cassette is operably linked to an EF1α promoter. In some cases, the cassette is operably linked to an H1 promoter. In some cases, the recombinant expression vector comprises a 5′ AAV ITR sequence and a 3′ AAV ITR sequence. In some cases, the AAV ITRs are AAV9 ITRs. In some cases, the AAV ITRs are AAV2 ITRs. 66) In some cases, a recombinant expression vector comprises one of the following cassettes. In some cases, a cassette comprises, in order from 5′ to 3′: i) SEQ ID NO:854; ii) SEQ ID NO:442; iii) a sequence that is complementary to SEQ ID NO: 442, where the sequence can comprise from 0 to 10 mismatches (non-complementary nucleotides) to SEQ ID NO: 442; and iv) SEQ ID NO:855. In some cases, a cassette comprises, in order from 5′ to 3′: i) SEQ ID NO:856; ii) SEQ ID NO: 442; iii) a sequence that is complementary to SEQ ID NO: 442, where the sequence can comprise from 0 to 10 mismatches (non-complementary nucleotides) to SEQ ID NO: 442; and iv) SEQ ID NO: 857. In some cases, a cassette comprises, in order from 5′ to 3′: i) SEQ ID NO:858; ii) SEQ ID NO: 442; iii) a sequence that is complementary to SEQ ID NO: 442, where the sequence can comprise from 0 to 10 mismatches (non-complementary nucleotides) to SEQ ID NO: 442; and iv) SEQ ID NO:859. In some cases, the cassette is operably linked to a promoter that is functional in a eukaryotic cell. In some cases, the cassette is operably linked to an RNA polymerase II promoter. In some cases, the cassette is operably linked to an RNA polymerase III promoter. In some cases, the cassette is operably linked to a CAG promoter. In some cases, the cassette is operably linked to a CBA promoter. In some cases, the cassette is operably linked to a CMV promoter. In some cases, the cassette is operably linked to a U6 promoter. In some cases, the cassette is operably linked to an EF1α promoter. In some cases, the cassette is operably linked to an H1 promoter. In some cases, the recombinant expression vector comprises a 5′ AAV ITR sequence and a 3′ AAV ITR sequence. In some cases, the AAV ITRs are AAV9 ITRs. In some cases, the AAV ITRs are AAV2 ITRs.
67) In some cases, a recombinant expression vector comprises one of the following cassettes. In some cases, a cassette comprises, in order from 5′ to 3′: i) SEQ ID NO:854; ii) SEQ ID NO:443; iii) a sequence that is complementary to SEQ ID NO: 443, where the sequence can comprise from 0 to 10 mismatches (non-complementary nucleotides) to SEQ ID NO: 443; and iv) SEQ ID NO:855. In some cases, a cassette comprises, in order from 5′ to 3′: i) SEQ ID NO:856; ii) SEQ ID NO: 443; iii) a sequence that is complementary to SEQ ID NO: 443, where the sequence can comprise from 0 to 10 mismatches (non-complementary nucleotides) to SEQ ID NO: 443; and iv) SEQ ID NO: 857. In some cases, a cassette comprises, in order from 5′ to 3′: i) SEQ ID NO:858; ii) SEQ ID NO: 443; iii) a sequence that is complementary to SEQ ID NO: 443, where the sequence can comprise from 0 to 10 mismatches (non-complementary nucleotides) to SEQ ID NO: 443; and iv) SEQ ID NO:859. In some cases, the cassette is operably linked to a promoter that is functional in a eukaryotic cell. In some cases, the cassette is operably linked to an RNA polymerase II promoter. In some cases, the cassette is operably linked to an RNA polymerase III promoter. In some cases, the cassette is operably linked to a CAG promoter. In some cases, the cassette is operably linked to a CBA promoter. In some cases, the cassette is operably linked to a CMV promoter. In some cases, the cassette is operably linked to a U6 promoter. In some cases, the cassette is operably linked to an EF1α promoter. In some cases, the cassette is operably linked to an H1 promoter. In some cases, the recombinant expression vector comprises a 5′ AAV ITR sequence and a 3′ AAV ITR sequence. In some cases, the AAV ITRs are AAV9 ITRs. In some cases, the AAV ITRs are AAV2 ITRs.
68) In some cases, a recombinant expression vector comprises one of the following cassettes. In some cases, a cassette comprises, in order from 5′ to 3′: i) SEQ ID NO:854; ii) SEQ ID NO:444; iii) a sequence that is complementary to SEQ ID NO: 444, where the sequence can comprise from 0 to 10 mismatches (non-complementary nucleotides) to SEQ ID NO: 444; and iv) SEQ ID NO:855. In some cases, a cassette comprises, in order from 5′ to 3′: i) SEQ ID NO:856; ii) SEQ ID NO: 444; iii) a sequence that is complementary to SEQ ID NO: 444, where the sequence can comprise from 0 to 10 mismatches (non-complementary nucleotides) to SEQ ID NO: 444; and iv) SEQ ID NO: 857. In some cases, a cassette comprises, in order from 5′ to 3′: i) SEQ ID NO:858; ii) SEQ ID NO: 444; iii) a sequence that is complementary to SEQ ID NO: 444, where the sequence can comprise from 0 to 10 mismatches (non-complementary nucleotides) to SEQ ID NO: 444; and iv) SEQ ID NO:859. In some cases, the cassette is operably linked to a promoter that is functional in a eukaryotic cell. In some cases, the cassette is operably linked to an RNA polymerase II promoter. In some cases, the cassette is operably linked to an RNA polymerase III promoter. In some cases, the cassette is operably linked to a CAG promoter. In some cases, the cassette is operably linked to a CBA promoter. In some cases, the cassette is operably linked to a CMV promoter. In some cases, the cassette is operably linked to a U6 promoter. In some cases, the cassette is operably linked to an EF1α promoter. In some cases, the cassette is operably linked to an H1 promoter. In some cases, the recombinant expression vector comprises a 5′ AAV ITR sequence and a 3′ AAV ITR sequence. In some cases, the AAV ITRs are AAV9 ITRs. In some cases, the AAV ITRs are AAV2 ITRs.
69) In some cases, a recombinant expression vector comprises one of the following cassettes. In some cases, a cassette comprises, in order from 5′ to 3′: i) SEQ ID NO:854; ii) SEQ ID NO:445; iii) a sequence that is complementary to SEQ ID NO: 445, where the sequence can comprise from 0 to 10 mismatches (non-complementary nucleotides) to SEQ ID NO: 445; and iv) SEQ ID NO:855. In some cases, a cassette comprises, in order from 5′ to 3′: i) SEQ ID NO:856; ii) SEQ ID NO: 445; iii) a sequence that is complementary to SEQ ID NO: 445, where the sequence can comprise from 0 to 10 mismatches (non-complementary nucleotides) to SEQ ID NO: 445; and iv) SEQ ID NO: 857. In some cases, a cassette comprises, in order from 5′ to 3′: i) SEQ ID NO:858; ii) SEQ ID NO: 445; iii) a sequence that is complementary to SEQ ID NO: 445, where the sequence can comprise from 0 to 10 mismatches (non-complementary nucleotides) to SEQ ID NO: 445; and iv) SEQ ID NO:859. In some cases, the cassette is operably linked to a promoter that is functional in a eukaryotic cell. In some cases, the cassette is operably linked to an RNA polymerase II promoter. In some cases, the cassette is operably linked to an RNA polymerase III promoter. In some cases, the cassette is operably linked to a CAG promoter. In some cases, the cassette is operably linked to a CBA promoter. In some cases, the cassette is operably linked to a CMV promoter. In some cases, the cassette is operably linked to a U6 promoter. In some cases, the cassette is operably linked to an EF1α promoter. In some cases, the cassette is operably linked to an H1 promoter. In some cases, the recombinant expression vector comprises a 5′ AAV ITR sequence and a 3′ AAV ITR sequence. In some cases, the AAV ITRs are AAV9 ITRs. In some cases, the AAV ITRs are AAV2 ITRs.
70) In some cases, a recombinant expression vector comprises one of the following cassettes. In some cases, a cassette comprises, in order from 5′ to 3′: i) SEQ ID NO:854; ii) SEQ ID NO:446; iii) a sequence that is complementary to SEQ ID NO: 446, where the sequence can comprise from 0 to 10 mismatches (non-complementary nucleotides) to SEQ ID NO: 446; and iv) SEQ ID NO:855. In some cases, a cassette comprises, in order from 5′ to 3′: i) SEQ ID NO:856; ii) SEQ ID NO: 446; iii) a sequence that is complementary to SEQ ID NO: 446, where the sequence can comprise from 0 to 10 mismatches (non-complementary nucleotides) to SEQ ID NO: 446; and iv) SEQ ID NO: 857. In some cases, a cassette comprises, in order from 5′ to 3′: i) SEQ ID NO:858; ii) SEQ ID NO: 446; iii) a sequence that is complementary to SEQ ID NO: 446, where the sequence can comprise from 0 to 10 mismatches (non-complementary nucleotides) to SEQ ID NO: 446; and iv) SEQ ID NO:859. In some cases, the cassette is operably linked to a promoter that is functional in a eukaryotic cell. In some cases, the cassette is operably linked to an RNA polymerase II promoter. In some cases, the cassette is operably linked to an RNA polymerase III promoter. In some cases, the cassette is operably linked to a CAG promoter. In some cases, the cassette is operably linked to a CBA promoter. In some cases, the cassette is operably linked to a CMV promoter. In some cases, the cassette is operably linked to a U6 promoter. In some cases, the cassette is operably linked to an EF1α promoter. In some cases, the cassette is operably linked to an H1 promoter. In some cases, the recombinant expression vector comprises a 5′ AAV ITR sequence and a 3′ AAV ITR sequence. In some cases, the AAV ITRs are AAV9 ITRs. In some cases, the AAV ITRs are AAV2 ITRs.
71) In some cases, a recombinant expression vector comprises one of the following cassettes. In some cases, a cassette comprises, in order from 5′ to 3′: i) SEQ ID NO:854; ii) SEQ ID NO:447; iii) a sequence that is complementary to SEQ ID NO: 447, where the sequence can comprise from 0 to 10 mismatches (non-complementary nucleotides) to SEQ ID NO: 447; and iv) SEQ ID NO:855. In some cases, a cassette comprises, in order from 5′ to 3′: i) SEQ ID NO:856; ii) SEQ ID NO: 447; iii) a sequence that is complementary to SEQ ID NO: 447, where the sequence can comprise from 0 to 10 mismatches (non-complementary nucleotides) to SEQ ID NO: 447; and iv) SEQ ID NO: 857. In some cases, a cassette comprises, in order from 5′ to 3′: i) SEQ ID NO:858; ii) SEQ ID NO: 447; iii) a sequence that is complementary to SEQ ID NO: 447, where the sequence can comprise from 0 to 10 mismatches (non-complementary nucleotides) to SEQ ID NO: 447; and iv) SEQ ID NO:859. In some cases, the cassette is operably linked to a promoter that is functional in a eukaryotic cell. In some cases, the cassette is operably linked to an RNA polymerase II promoter. In some cases, the cassette is operably linked to an RNA polymerase III promoter. In some cases, the cassette is operably linked to a CAG promoter. In some cases, the cassette is operably linked to a CBA promoter. In some cases, the cassette is operably linked to a CMV promoter. In some cases, the cassette is operably linked to a U6 promoter. In some cases, the cassette is operably linked to an EF1α promoter. In some cases, the cassette is operably linked to an H1 promoter. In some cases, the recombinant expression vector comprises a 5′ AAV ITR sequence and a 3′ AAV ITR sequence. In some cases, the AAV ITRs are AAV9 ITRs. In some cases, the AAV ITRs are AAV2 ITRs.
72) In some cases, a recombinant expression vector comprises one of the following cassettes. In some cases, a cassette comprises, in order from 5′ to 3′: i) SEQ ID NO:854; ii) SEQ ID NO:448; iii) a sequence that is complementary to SEQ ID NO: 448, where the sequence can comprise from 0 to 10 mismatches (non-complementary nucleotides) to SEQ ID NO: 448; and iv) SEQ ID NO:855. In some cases, a cassette comprises, in order from 5′ to 3′: i) SEQ ID NO:856; ii) SEQ ID NO: 448; iii) a sequence that is complementary to SEQ ID NO: 448, where the sequence can comprise from 0 to 10 mismatches (non-complementary nucleotides) to SEQ ID NO: 448; and iv) SEQ ID NO: 857. In some cases, a cassette comprises, in order from 5′ to 3′: i) SEQ ID NO:858; ii) SEQ ID NO: 448; iii) a sequence that is complementary to SEQ ID NO: 448, where the sequence can comprise from 0 to 10 mismatches (non-complementary nucleotides) to SEQ ID NO: 448; and iv) SEQ ID NO:859. In some cases, the cassette is operably linked to a promoter that is functional in a eukaryotic cell. In some cases, the cassette is operably linked to an RNA polymerase II promoter. In some cases, the cassette is operably linked to an RNA polymerase III promoter. In some cases, the cassette is operably linked to a CAG promoter. In some cases, the cassette is operably linked to a CBA promoter. In some cases, the cassette is operably linked to a CMV promoter. In some cases, the cassette is operably linked to a U6 promoter. In some cases, the cassette is operably linked to an EF1α promoter. In some cases, the cassette is operably linked to an H1 promoter. In some cases, the recombinant expression vector comprises a 5′ AAV ITR sequence and a 3′ AAV ITR sequence. In some cases, the AAV ITRs are AAV9 ITRs. In some cases, the AAV ITRs are AAV2 ITRs.
73) In some cases, a recombinant expression vector comprises one of the following cassettes. In some cases, a cassette comprises, in order from 5′ to 3′: i) SEQ ID NO:854; ii) SEQ ID NO:449; iii) a sequence that is complementary to SEQ ID NO: 449, where the sequence can comprise from 0 to 10 mismatches (non-complementary nucleotides) to SEQ ID NO: 449; and iv) SEQ ID NO:855. In some cases, a cassette comprises, in order from 5′ to 3′: i) SEQ ID NO:856; ii) SEQ ID NO: 449; iii) a sequence that is complementary to SEQ ID NO: 449, where the sequence can comprise from 0 to 10 mismatches (non-complementary nucleotides) to SEQ ID NO: 449; and iv) SEQ ID NO: 857. In some cases, a cassette comprises, in order from 5′ to 3′: i) SEQ ID NO:858; ii) SEQ ID NO: 449; iii) a sequence that is complementary to SEQ ID NO: 449, where the sequence can comprise from 0 to 10 mismatches (non-complementary nucleotides) to SEQ ID NO: 449; and iv) SEQ ID NO:859. In some cases, the cassette is operably linked to a promoter that is functional in a eukaryotic cell. In some cases, the cassette is operably linked to an RNA polymerase II promoter. In some cases, the cassette is operably linked to an RNA polymerase III promoter. In some cases, the cassette is operably linked to a CAG promoter. In some cases, the cassette is operably linked to a CBA promoter. In some cases, the cassette is operably linked to a CMV promoter. In some cases, the cassette is operably linked to a U6 promoter. In some cases, the cassette is operably linked to an EF1α promoter. In some cases, the cassette is operably linked to an H1 promoter. In some cases, the recombinant expression vector comprises a 5′ AAV ITR sequence and a 3′ AAV ITR sequence. In some cases, the AAV ITRs are AAV9 ITRs. In some cases, the AAV ITRs are AAV2 ITRs.
74) In some cases, a recombinant expression vector comprises one of the following cassettes. In some cases, a cassette comprises, in order from 5′ to 3′: i) SEQ ID NO:854; ii) SEQ ID NO:450; iii) a sequence that is complementary to SEQ ID NO: 450, where the sequence can comprise from 0 to 10 mismatches (non-complementary nucleotides) to SEQ ID NO: 450; and iv) SEQ ID NO:855. In some cases, a cassette comprises, in order from 5′ to 3′: i) SEQ ID NO:856; ii) SEQ ID NO: 450; iii) a sequence that is complementary to SEQ ID NO: 450, where the sequence can comprise from 0 to 10 mismatches (non-complementary nucleotides) to SEQ ID NO: 450; and iv) SEQ ID NO: 857. In some cases, a cassette comprises, in order from 5′ to 3′: i) SEQ ID NO:858; ii) SEQ ID NO: 450; iii) a sequence that is complementary to SEQ ID NO: 450, where the sequence can comprise from 0 to 10 mismatches (non-complementary nucleotides) to SEQ ID NO: 450; and iv) SEQ ID NO:859. In some cases, the cassette is operably linked to a promoter that is functional in a eukaryotic cell. In some cases, the cassette is operably linked to an RNA polymerase II promoter. In some cases, the cassette is operably linked to an RNA polymerase III promoter. In some cases, the cassette is operably linked to a CAG promoter. In some cases, the cassette is operably linked to a CBA promoter. In some cases, the cassette is operably linked to a CMV promoter. In some cases, the cassette is operably linked to a U6 promoter. In some cases, the cassette is operably linked to an EF1α promoter. In some cases, the cassette is operably linked to an H1 promoter. In some cases, the recombinant expression vector comprises a 5′ AAV ITR sequence and a 3′ AAV ITR sequence. In some cases, the AAV ITRs are AAV9 ITRs. In some cases, the AAV ITRs are AAV2 ITRs.
75) In some cases, a recombinant expression vector comprises one of the following cassettes. In some cases, a cassette comprises, in order from 5′ to 3′: i) SEQ ID NO:854; ii) SEQ ID NO:451; iii) a sequence that is complementary to SEQ ID NO: 451, where the sequence can comprise from 0 to 10 mismatches (non-complementary nucleotides) to SEQ ID NO: 451; and iv) SEQ ID NO:855. In some cases, a cassette comprises, in order from 5′ to 3′: i) SEQ ID NO:856; ii) SEQ ID NO: 451; iii) a sequence that is complementary to SEQ ID NO: 451, where the sequence can comprise from 0 to 10 mismatches (non-complementary nucleotides) to SEQ ID NO: 451; and iv) SEQ ID NO: 857. In some cases, a cassette comprises, in order from 5′ to 3′: i) SEQ ID NO:858; ii) SEQ ID NO: 451; iii) a sequence that is complementary to SEQ ID NO: 451, where the sequence can comprise from 0 to 10 mismatches (non-complementary nucleotides) to SEQ ID NO: 451; and iv) SEQ ID NO:859. In some cases, the cassette is operably linked to a promoter that is functional in a eukaryotic cell. In some cases, the cassette is operably linked to an RNA polymerase II promoter. In some cases, the cassette is operably linked to an RNA polymerase III promoter. In some cases, the cassette is operably linked to a CAG promoter. In some cases, the cassette is operably linked to a CBA promoter. In some cases, the cassette is operably linked to a CMV promoter. In some cases, the cassette is operably linked to a U6 promoter. In some cases, the cassette is operably linked to an EF1α promoter. In some cases, the cassette is operably linked to an H1 promoter. In some cases, the recombinant expression vector comprises a 5′ AAV ITR sequence and a 3′ AAV ITR sequence. In some cases, the AAV ITRs are AAV9 ITRs. In some cases, the AAV ITRs are AAV2 ITRs.
76) In some cases, a recombinant expression vector comprises one of the following cassettes. In some cases, a cassette comprises, in order from 5′ to 3′: i) SEQ ID NO:854; ii) SEQ ID NO:452; iii) a sequence that is complementary to SEQ ID NO: 452, where the sequence can comprise from 0 to 10 mismatches (non-complementary nucleotides) to SEQ ID NO: 452; and iv) SEQ ID NO:855. In some cases, a cassette comprises, in order from 5′ to 3′: i) SEQ ID NO:856; ii) SEQ ID NO: 452; iii) a sequence that is complementary to SEQ ID NO: 452, where the sequence can comprise from 0 to 10 mismatches (non-complementary nucleotides) to SEQ ID NO: 452; and iv) SEQ ID NO: 857. In some cases, a cassette comprises, in order from 5′ to 3′: i) SEQ ID NO:858; ii) SEQ ID NO: 452; iii) a sequence that is complementary to SEQ ID NO: 452, where the sequence can comprise from 0 to 10 mismatches (non-complementary nucleotides) to SEQ ID NO: 452; and iv) SEQ ID NO:859. In some cases, the cassette is operably linked to a promoter that is functional in a eukaryotic cell. In some cases, the cassette is operably linked to an RNA polymerase II promoter. In some cases, the cassette is operably linked to an RNA polymerase III promoter. In some cases, the cassette is operably linked to a CAG promoter. In some cases, the cassette is operably linked to a CBA promoter. In some cases, the cassette is operably linked to a CMV promoter. In some cases, the cassette is operably linked to a U6 promoter. In some cases, the cassette is operably linked to an EF1α promoter. In some cases, the cassette is operably linked to an H1 promoter. In some cases, the recombinant expression vector comprises a 5′ AAV ITR sequence and a 3′ AAV ITR sequence. In some cases, the AAV ITRs are AAV9 ITRs. In some cases, the AAV ITRs are AAV2 ITRs.
77) In some cases, a recombinant expression vector comprises one of the following cassettes. In some cases, a cassette comprises, in order from 5′ to 3′: i) SEQ ID NO:854; ii) SEQ ID NO:453; iii) a sequence that is complementary to SEQ ID NO: 453, where the sequence can comprise from 0 to 10 mismatches (non-complementary nucleotides) to SEQ ID NO: 453; and iv) SEQ ID NO:855. In some cases, a cassette comprises, in order from 5′ to 3′: i) SEQ ID NO:856; ii) SEQ ID NO: 453; iii) a sequence that is complementary to SEQ ID NO: 453, where the sequence can comprise from 0 to 10 mismatches (non-complementary nucleotides) to SEQ ID NO: 453; and iv) SEQ ID NO: 857. In some cases, a cassette comprises, in order from 5′ to 3′: i) SEQ ID NO:858; ii) SEQ ID NO: 453; iii) a sequence that is complementary to SEQ ID NO: 453, where the sequence can comprise from 0 to 10 mismatches (non-complementary nucleotides) to SEQ ID NO: 453; and iv) SEQ ID NO:859. In some cases, the cassette is operably linked to a promoter that is functional in a eukaryotic cell. In some cases, the cassette is operably linked to an RNA polymerase II promoter. In some cases, the cassette is operably linked to an RNA polymerase III promoter. In some cases, the cassette is operably linked to a CAG promoter. In some cases, the cassette is operably linked to a CBA promoter. In some cases, the cassette is operably linked to a CMV promoter. In some cases, the cassette is operably linked to a U6 promoter. In some cases, the cassette is operably linked to an EF1α promoter. In some cases, the cassette is operably linked to an H1 promoter. In some cases, the recombinant expression vector comprises a 5′ AAV ITR sequence and a 3′ AAV ITR sequence. In some cases, the AAV ITRs are AAV9 ITRs. In some cases, the AAV ITRs are AAV2 ITRs.
78) In some cases, a recombinant expression vector comprises one of the following cassettes. In some cases, a cassette comprises, in order from 5′ to 3′: i) SEQ ID NO:854; ii) SEQ ID NO:454; iii) a sequence that is complementary to SEQ ID NO: 454, where the sequence can comprise from 0 to 10 mismatches (non-complementary nucleotides) to SEQ ID NO: 454; and iv) SEQ ID NO:855. In some cases, a cassette comprises, in order from 5′ to 3′: i) SEQ ID NO:856; ii) SEQ ID NO: 454; iii) a sequence that is complementary to SEQ ID NO: 454, where the sequence can comprise from 0 to 10 mismatches (non-complementary nucleotides) to SEQ ID NO: 454; and iv) SEQ ID NO: 857. In some cases, a cassette comprises, in order from 5′ to 3′: i) SEQ ID NO:858; ii) SEQ ID NO: 454; iii) a sequence that is complementary to SEQ ID NO: 454, where the sequence can comprise from 0 to 10 mismatches (non-complementary nucleotides) to SEQ ID NO: 454; and iv) SEQ ID NO:859. In some cases, the cassette is operably linked to a promoter that is functional in a eukaryotic cell. In some cases, the cassette is operably linked to an RNA polymerase II promoter. In some cases, the cassette is operably linked to an RNA polymerase III promoter. In some cases, the cassette is operably linked to a CAG promoter. In some cases, the cassette is operably linked to a CBA promoter. In some cases, the cassette is operably linked to a CMV promoter. In some cases, the cassette is operably linked to a U6 promoter. In some cases, the cassette is operably linked to an EF1α promoter. In some cases, the cassette is operably linked to an H1 promoter. In some cases, the recombinant expression vector comprises a 5′ AAV ITR sequence and a 3′ AAV ITR sequence. In some cases, the AAV ITRs are AAV9 ITRs. In some cases, the AAV ITRs are AAV2 ITRs.
79) In some cases, a recombinant expression vector comprises one of the following cassettes. In some cases, a cassette comprises, in order from 5′ to 3′: i) SEQ ID NO:854; ii) SEQ ID NO:455; iii) a sequence that is complementary to SEQ ID NO: 455, where the sequence can comprise from 0 to 10 mismatches (non-complementary nucleotides) to SEQ ID NO: 455; and iv) SEQ ID NO:855. In some cases, a cassette comprises, in order from 5′ to 3′: i) SEQ ID NO:856; ii) SEQ ID NO: 455; iii) a sequence that is complementary to SEQ ID NO: 455, where the sequence can comprise from 0 to 10 mismatches (non-complementary nucleotides) to SEQ ID NO: 455; and iv) SEQ ID NO: 857. In some cases, a cassette comprises, in order from 5′ to 3′: i) SEQ ID NO:858; ii) SEQ ID NO: 455; iii) a sequence that is complementary to SEQ ID NO: 455, where the sequence can comprise from 0 to 10 mismatches (non-complementary nucleotides) to SEQ ID NO: 455; and iv) SEQ ID NO:859. In some cases, the cassette is operably linked to a promoter that is functional in a eukaryotic cell. In some cases, the cassette is operably linked to an RNA polymerase II promoter. In some cases, the cassette is operably linked to an RNA polymerase III promoter. In some cases, the cassette is operably linked to a CAG promoter. In some cases, the cassette is operably linked to a CBA promoter. In some cases, the cassette is operably linked to a CMV promoter. In some cases, the cassette is operably linked to a U6 promoter. In some cases, the cassette is operably linked to an EF1α promoter. In some cases, the cassette is operably linked to an H1 promoter. In some cases, the recombinant expression vector comprises a 5′ AAV ITR sequence and a 3′ AAV ITR sequence. In some cases, the AAV ITRs are AAV9 ITRs. In some cases, the AAV ITRs are AAV2 ITRs.
80) In some cases, a recombinant expression vector comprises one of the following cassettes. In some cases, a cassette comprises, in order from 5′ to 3′: i) SEQ ID NO:854; ii) SEQ ID NO:456; iii) a sequence that is complementary to SEQ ID NO: 456, where the sequence can comprise from 0 to 10 mismatches (non-complementary nucleotides) to SEQ ID NO: 456; and iv) SEQ ID NO:855. In some cases, a cassette comprises, in order from 5′ to 3′: i) SEQ ID NO:856; ii) SEQ ID NO: 456; iii) a sequence that is complementary to SEQ ID NO: 456, where the sequence can comprise from 0 to 10 mismatches (non-complementary nucleotides) to SEQ ID NO: 456; and iv) SEQ ID NO: 857. In some cases, a cassette comprises, in order from 5′ to 3′: i) SEQ ID NO:858; ii) SEQ ID NO: 456; iii) a sequence that is complementary to SEQ ID NO: 456, where the sequence can comprise from 0 to 10 mismatches (non-complementary nucleotides) to SEQ ID NO: 456; and iv) SEQ ID NO:859. In some cases, the cassette is operably linked to a promoter that is functional in a eukaryotic cell. In some cases, the cassette is operably linked to an RNA polymerase II promoter. In some cases, the cassette is operably linked to an RNA polymerase III promoter. In some cases, the cassette is operably linked to a CAG promoter. In some cases, the cassette is operably linked to a CBA promoter. In some cases, the cassette is operably linked to a CMV promoter. In some cases, the cassette is operably linked to a U6 promoter. In some cases, the cassette is operably linked to an EF1α promoter. In some cases, the cassette is operably linked to an H1 promoter. In some cases, the recombinant expression vector comprises a 5′ AAV ITR sequence and a 3′ AAV ITR sequence. In some cases, the AAV ITRs are AAV9 ITRs. In some cases, the AAV ITRs are AAV2 ITRs.

### Delivery Vehicles

[0215] A recombinant expression vector of the present disclosure can be present in a delivery vehicle. Thus, the present disclosure provides a delivery vehicle comprising a recombinant expression vector of the present disclosure. In some cases, the delivery vehicle is a non-viral delivery vehicle. In some cases, the delivery vehicle is a lipid nanoparticle. In some cases, the delivery vehicle is a viral delivery vehicle. In some cases, the viral delivery vehicle is a recombinant AAV virion. Suitable AAV virions include those with AAV2 capsid, an AAV9 capsid, and the like.

[0216] Suitable lipid nanoparticles can include, e.g., one or more cationic lipids, lipids modified with poly (ethylene glycol) (“PEGylated lipids”), and the like. Suitable cationic lipids include, but are not limited to, XTC (2,2-dilinoleyl-4-dimethylaminoethyl-[1,3]-dioxolane), MC3 (((6Z,9Z,28Z,31Z)-heptatriaconta-6,9,28,31-tetraen-19-yl 4-(dimethylamino) butanoate), ALNY-100 ((3aR,5s,6aS)-N,N-dimethyl-2,2-di((92,12Z)-octadeca-9,12-dienyl)tetrahydr-o-3aH-cyclopenta[d][1,3]dioxol-5-amine)), NC98-5 (4,7,13-tris(3-oxo-3-(undecylamino)propyl)-N1,N16-diundecyl-4,7,10,13-tet-raazahexadecane-1,16-diamide), DODAP (1,2-dioleyl-3-dimethylammonium propane), HGT4003, ICE, HGT5000, cis or trans HGT5001, DOTAP (1,2-dioleyl-3-trimethylammonium propane), DOTMA (1,2-di-O-octadecenyl-3-trimethylammonium propane), DLinDMA, DLin-KC2-DMA, and C12-200. Other suitable lipids that can be included in a lipid nanoparticle include, but are not limited to, DSPC (1,2-distearoyl-sn-glycero-3-phosphocholine), DPPC (1,2-dipalmitoyl-sn-glycero-3-phosphocholine), DOPE (1,2-dioleyl-sn-glycero-3-phosphoethanolamine), DPPE (1,2-dipalmitoyl-sn-glycero-3-phosphoethanolamine), DMPE (1,2-dimyristoyl-sn-glycero-3-phosphoethanolamine), DOPG (1,2-dioleoyl-sn-glycero-3-phospho-(1′-rac-glycerol)), and cholesterol. Suitable PEGylated lipids include, e.g., PEG-DSG (1,2-Distearoyl-rac-glycero-3-methoxypolyethylene glycol conjugated to, e.g., PEG-1000, PEG-2000, PEG-5000, and the like), PEG-DMG (1,2-Dimyristoyl-rac-glycerol conjugated to PEG), and PEG-ceramides.

### D. Pharmaceutical Compositions

[0217] The disclosure provides pharmaceutical compositions comprising nucleic acids (e.g., DNA), expression cassettes, or vectors encoding double stranded RNAs described herein and a pharmaceutically acceptable carrier. As used herein, the term “pharmaceutically acceptable” refers to those compounds, materials, compositions, and/or dosage forms which are, within the scope of sound medical judgment, suitable for use in contact with cells and/or tissues without excessive toxicity, irritation, allergic response, or other problem or complication, commensurate with a reasonable benefit/risk ratio.

[0218] As used herein, the term “pharmaceutically acceptable carrier” means a pharmaceutically acceptable material, composition or carrier, such as a liquid or solid filler, stabilizer, dispersing agent, suspending agent, diluent, excipient, thickening agent, solvent or encapsulating material, involved in carrying or transporting a compound useful within the invention within or to the patient such that it may perform its intended function. Each carrier must be “acceptable” in the sense of being compatible with the other ingredients of the formulation and not injurious to the cell or tissue being contacted. Additional ingredients that may be included in the pharmaceutical compositions used in the practice of the invention are known in the art and described, for example in Remington's Pharmaceutical Sciences (Genaro, Ed., Mack Publishing Co., 1985, Easton, PA), which is incorporated herein by reference.

[0219] As is well known in the medical arts, the dosage for any one patient depends upon many factors, including the patient's size, weight, body surface area, age, the level of expression of inhibitory RNA expression required to achieve a therapeutic effect, stability of the inhibitory nucleic acid, specific disease being treated, stage of disease, sex, time and route of administration, general health, and other drugs being administered concurrently.

[0220] In some embodiments, rAAVs as described herein are administered to a subject in an amount of about 1×10⁶ VG (viral genomes) to about 1×10¹⁶ VG per subject, or about 1×10⁶, 2×10⁶, 3×10⁶, 4×10⁶, 5×10⁶, 6×10⁶, 7×10⁶, 8×10⁶, 9×10⁶, 1×10⁷, 2×10⁷, 3×10⁷, 4×10⁷, 5×10⁷, 6×10⁷, 7×10⁷, 8×10⁷, 9×10⁷, 1×10⁸, 2×10⁸, 3×10⁸, 4×10⁸, 5×10⁸, 6×10⁸, 7×10⁸, 8×10⁸, 9×10⁸, 1×10⁹, 2×10⁹, 3×10⁹, 4×10⁹, 5×10⁹, 6×10⁹, 7×10⁹, 8×10⁹, 9×10⁹, 1×10¹⁰, 2×10¹⁰, 3×10¹⁰, 4×10¹⁰, 5×10¹⁰, 6×10¹⁰, 7×10¹⁰, 8×10¹⁰, 9×10¹⁰, 1×10¹¹, 2×10¹¹, 2.1×10¹¹, 2.2×10¹¹, 2.3×10¹¹, 2.4×10¹¹, 2.5×10¹¹, 2.6×10¹¹, 2.7×10¹¹, 2.8×10¹¹, 2.9×10¹¹, 3×10¹¹, 4×10¹¹, 5×10¹¹, 6×10¹¹, 7×10¹¹, 7.1×10¹¹, 7.2×10¹¹, 7.3×10¹¹, 7.4×10¹¹, 7.5×10¹¹, 7.6×10¹¹, 7.7×10¹¹, 7.8×10¹¹, 7.9×10¹¹, 8×10¹¹, 9×10¹¹, 1×10¹¹, 1.1×10¹², 1.2×10¹², 1.3×10¹², 1.4×10¹², 1.5×10¹², 1.6×10¹², 1.7×10¹², 1.8×10¹², 1.9×10¹², 2×10¹², 3×10¹², 4×10¹², 4.1×10², 4.2×10¹², 4.3×10¹², 4.4×10¹², 4.5×10¹², 4.6×10¹², 4.7×10¹², 4.8×10¹², 4.9×10¹², 5×10¹², 6×10¹², 7×10¹², 8×10¹², 8.1×10², 8.2×10¹², 8.3×10¹², 8.4×10¹², 8.5×10¹², 8.6×10¹², 8.7×10¹², 8.8×10¹², 8.9×10¹², 9×10¹², 1×10¹¹, 2×10¹¹, 3×10¹¹, 4×10¹¹, 5×10¹¹, 6×10¹¹, 6.7×10¹¹, 7×10¹¹, 8×10¹¹, 9×10¹¹, 1×10¹⁴, 2×10¹⁴, 3×10¹⁴, 4×10¹⁴, 5×10¹⁴, 6×10¹⁴, 7×10¹⁴, 8×10¹⁴, 9×10¹⁴, 1×10¹⁵, 2×10¹⁵, 3×10¹⁵, 4×10¹⁵, 5×10¹⁵, 6×10¹⁵, 7×10¹⁵, 8×10¹⁵, 9×10¹⁵, or 1×10¹⁶ VG/subject. In some embodiments, rAAV particles as described herein are administered to a subject in an amount of about 1×10⁶ VG/kg to about 1×10¹⁶ VG/kg, or about 1×10⁶, 2×10⁶, 3×10⁶, 4×10⁶, 5×10⁶, 6×10⁶, 7×10⁶, 8×10⁶, 9×10⁶, 1×10⁷, 2×10⁷, 3×10⁷, 4×10⁷, 5×10⁷, 6×10⁷, 7×10⁷, 8×10⁷, 9×10⁷, 1×10⁸, 2×10⁸, 3×10⁸, 4×10⁸, 5×10⁸, 6×10⁸, 7×10⁸, 8×10⁸, 9×10⁸, 1×10⁹, 2×10⁹, 3×10⁹, 4×10⁹, 5×10⁹, 6×10⁹, 7×10⁹, 8×10⁹, 9×10⁹, 1×10¹⁰, 2×10¹⁰, 3×10¹⁰, 4×10¹⁰, 5×10¹⁰, 6×10¹⁰ , 7×10¹⁰, 8×10¹⁰, 9×10¹⁰, 1×10¹¹, 2×10¹¹, 2.1×10¹¹, 2.2×10¹¹, 2.3×10¹¹, 2.4×10¹¹, 2.5×10¹¹, 2.6×10¹¹, 2.7×10¹¹, 2.8×10¹¹, 2.9×10¹¹, 3×10¹¹, 4×10¹¹, 5×10¹¹, 6×10¹¹, 7×10¹¹, 7.1×10¹¹, 7.2×10¹¹, 7.3×10¹¹, 7.4×10¹¹, 7.5×10¹¹, 7.6×10¹¹, 7.7×10¹¹, 7.8×10¹¹, 7.9×10¹¹, 8×10¹¹, 9×10¹¹, 1×10¹², 1.1×10¹², 1.2×10¹², 1.3×10¹², 1.4×10¹², 1.5×10¹², 1.6×10¹², 1.7×10¹², 1.8×10¹², 1.9×10¹², 2×10¹², 3×10¹², 4×10¹², 4.1×10², 4.2×10¹², 4.3×10¹², 4.4×10¹², 4.5×10¹², 4.6×10¹², 4.7×10¹², 4.8×10¹², 4.9×10¹², 5×10¹², 6×10¹², 7×10¹², 8×10¹², 8.1×10², 8.2×10¹², 8.3×10¹², 8.4×10¹², 8.5×10¹², 8.6×10¹², 8.7×10¹², 8.8×10¹², 8.9×10¹², 9×10¹², 1×10¹¹, 2×10¹¹, 3×10¹¹, 4×10¹¹, 5×10¹¹, 6×10¹¹, 6.7×10¹¹, 7×10, 8×10, 9×10, 1×10¹⁴, 2×10¹⁴, 3×10¹⁴, 4×10¹⁴, 5×10¹⁴, 6×10¹⁴, 7×10¹⁴, 8×10¹⁴, 9×10¹⁴, 1×10¹⁵, 2×10¹⁵, 3×10¹⁵, 4×10¹⁵, 5×10¹⁵, 6×10¹⁵, 7×10¹⁵, 8×10¹⁵, 9×10¹⁵, or 1×10¹⁶ VG/kg.

[0221] Pharmaceutical compositions may be administered in a manner appropriate to the disease or condition to be treated (or prevented) as determined by persons skilled in the medical art. An appropriate dose and a suitable duration and frequency of administration of the compositions will be determined by such factors as the health condition of the patient, size of the patient (i.e., weight, mass, or body area), the type and severity of the patient's disease, the particular form of the active ingredient, and the method of administration. In general, an appropriate dose and treatment regimen provide the composition(s) in an amount sufficient to provide therapeutic and/or prophylactic benefit (such as described herein, including an improved clinical outcome, such as more frequent complete or partial remissions, or longer disease-free and/or overall survival, or a lessening of symptom severity). For prophylactic use, a dose should be sufficient to prevent, delay the onset of, or diminish the severity of a disease associated with disease or disorder. Prophylactic benefit of the compositions administered according to the methods described herein can be determined by performing pre-clinical (including in vitro and in vivo animal studies) and clinical studies and analyzing data obtained therefrom by appropriate statistical, biological, and clinical methods and techniques, all of which can readily be practiced by a person skilled in the art.

[0222] Compositions (e.g., pharmaceutical compositions) may be administered by any route, including enteral (e.g., oral), parenteral, intravenous, intramuscular, intra-arterial, intramedullary, intrathecal, subpial, intraparenchymal, intrastriatal, intracranial, intracisternal, intra-cerebral, intracerebral ventricular, intraocular, intraventricular, intralumbar, subcutaneous, transdermal, intradermal, rectal, intravaginal, intraperitoneal, topical (as by powders, ointments, creams, and/or drops), mucosal, nasal, buccal, sublingual; by intratracheal instillation, bronchial instillation, and/or inhalation; and/or as an oral spray, nasal spray, and/or aerosol. In general, the most appropriate route of administration will depend upon a variety of factors including the nature of the agent (e.g., its stability in the environment of the gastrointestinal tract), and/or the condition of the subject. In some embodiments, compositions are directly injected into the CNS of the subject. In some embodiments, direct injection into the CNS is intracerebral injection, intracerebral ventricular injection, intraparenchymal injection, intrathecal injection, intrastriatal injection, subpial injection, or any combination thereof. In some embodiments, direct injection into the CNS is direct injection into the cerebrospinal fluid (CSF) of the subject, optionally wherein the direct injection is intracisternal injection, intraventricular injection, and/or intralumbar injection. In some embodiments, compositions are administered by a combination of direct injection into the CNS and by a route that is not directly injected into the CNS (e.g., intravenously).

[0223] In some embodiments, pharmaceutical compositions comprising rAAV particles are formulated to reduce aggregation of rAAV particles, particularly where high rAAV particle concentrations are present (e.g., ˜10¹³ VG/ml or more). Methods for reducing aggregation of rAAV particles are well known in the art and, include, for example, addition of surfactants, pH adjustment, salt concentration adjustment, etc. (See, e.g., Wright F R, et al., Molecular Therapy (2005) 12:171-178, incorporated herein by reference in its entirety).

### D. Kits

[0224] In some embodiments, the compositions provided herein may be assembled into pharmaceutical or research kits to facilitate their use in therapeutic or research use. A kit may include one or more containers comprising: (a) expression cassette or vector encoding a double stranded RNA as described herein; (b) instructions for use; and optionally (c) reagents for transducing the kit component (a) into a host cell. In some embodiments, the kit component (a) may be in a pharmaceutical formulation and dosage suitable for a particular use and mode of administration. For example, the kit component (a) may be presented in unit-dose or multi-dose containers, such as sealed ampoules or vials. The components of the kit may require mixing one or more components prior to use or may be prepared in a premixed state. The components of the kit may be in liquid or solid form, and may require addition of a solvent or further dilution. The components of the kit may be sterile. The instructions may be in written or electronic form and may be associated with the kit (e.g., written insert, CD, DVD) or provided via internet or web-based communication. The kit may be shipped and stored at a refrigerated or frozen temperature.

### E. Methods of Use

[0225] The present disclosure provides nucleic acids (e.g., DNA), expression cassettes, recombinant expression vectors comprising a cassette, recombinant expression vectors encoding double stranded RNAs, or pharmaceutical compositions described herein for use in a method of therapy.

[0226] The present disclosure provides method for selectively reducing translation of a disease-associated CAG repeat-containing RNA in an individual having a CAG repeat expansion disorder, the method comprising administering to the individual an effective amount of a recombinant expression vector of the present disclosure, a delivery vehicle of the present disclosure, a viral particle of the present disclosure, or a pharmaceutical composition of the present disclosure. In some cases, the repeat expansion disorder is Huntington's disease, spinocerebellar ataxia type 1, spinocerebellar ataxia type 2, spinocerebellar ataxia type 3, spinocerebellar ataxia type 6, spinocerebellar ataxia type 7, spinocerebellar ataxia type 12, spinocerebellar ataxia type 17, spinal and bulbar muscular atrophy, dentatorubral pallidoluysian atrophy, or cleidocranial dysplasia. In some cases, said administering comprises direct injection to the central nervous system of the individual. In some cases, the direct injection is intracerebral injection, intracerebral ventricular injection intraparenchymal injection, intrathecal injection, intrastriatal injection, intrathalamic injection, intracisternal magna injection, subpial injection, or any combination thereof. In some cases, said administering provides for a ratio of a polypeptide encoded by the non-disease-associated CAG repeat-containing RNA to a polypeptide encoded by disease-associated CAG repeat-containing RNA of greater than 1.0. In some cases, said administering provides for a ratio of a polypeptide encoded by the non-disease-associated CAG repeat-containing RNA to a polypeptide encoded by disease-associated CAG repeat-containing RNA of from 1.1 to 1.8 (e.g., from 1.1 to 1.4, from 1.4 to 1.6, or from 1.6 to 1.8). In some cases, said administering provides for a ratio of a polypeptide encoded by the non-disease-associated CAG repeat-containing RNA to a polypeptide encoded by disease-associated CAG repeat-containing RNA of greater than 1.8 (e.g., 2.0, from 2.0 to 2.2, from 2.2 to 2.4, from 2.4 to 2.6, from 2.6 to 2.8, from 2.8 to 3.0).

[0227] The present disclosure provides methods for reducing or inhibiting expression of a CAG repeat containing RNA (e.g., mRNA or pre-mRNA) in a mammalian cell, comprising introducing into the mammalian cell a double stranded RNA comprising from 5′ to 3′:
[0228] (a) a 5′ leader sequence;
[0229] (b) a 5′ stem comprising or substantially comprising a passenger sequence;
[0230] (c) a 5′ linker;
[0231] (d) a terminal loop;
[0232] (e) a 3′ linker;
[0233] (f) a 3′ stem comprising or substantially comprising a guide sequence; and
[0234] (g) a 3′ trailer sequence;
[0235] wherein the guide sequence targets a CAG repeat region of a CAG repeat containing RNA (e.g., mRNA or pre-mRNA); and wherein the double stranded RNA is cleaved by the mammalian cell to produce a siRNA comprising the guide sequence and the passenger sequence, wherein the guide sequence of the siRNA comprises the 1-5 base mismatches relative to the CAG repeat region located at positions 8-16 of the guide sequence of the siRNA.

[0236] In some embodiments, inhibiting expression of a CAG repeat containing mRNA comprises inhibiting expression of the polyglutamine containing protein encoded by the CAG repeat containing mRNA, such as for example by binding to the CAG repeat region of a CAG repeat containing mRNA and blocking translation of the CAG repeat containing protein rather than by degradation of the CAG repeat containing mRNA.

[0237] In some embodiments, the method reduces or inhibits expression of a pathologic or pathogenic allele of a CAG repeat containing RNA. In some embodiments, the method selectively reduces or inhibits expression of a pathologic or pathogenic allele of a CAG repeat containing RNA compared to expression of a normal allele of a CAG repeat containing RNA.

[0238] In some embodiments, the double stranded RNA is contained within a pre-miRNA scaffold, pri-miRNA scaffold, or shRNA. In some embodiments, the double stranded RNA is cleaved by DROSHA and/or DICER in the mammalian cell to yield the siRNA.

[0239] In some embodiments, at least one mismatch relative to the CAG repeat region is located at positions 8-12 of the guide sequence of the siRNA. In some embodiments, at least one mismatch relative to the CAG repeat region is located at positions 9-11 of the guide sequence of the siRNA.

[0240] In some embodiments, two or more of the mismatches relative to the CAG repeat region located at positions 8-16 of the guide sequence of the siRNA are contiguous. In some embodiments, at least one mismatch relative to the CAG repeat region located at positions 8-16 of the guide sequence of the siRNA is not adjacent to another mismatch located at positions 8-16 of the guide sequence of the siRNA.

[0241] In some embodiments, the 5′ leader sequence is not complementary to the 3′ trailer sequence. In some embodiments, the 5′ leader sequence is partially complementary to the 3′ trailer sequence. In some embodiments, the 3′ trailer sequence comprises a polyU tail. In some embodiments, the polyU tail has 3 to 6 uridines.

[0242] In some embodiments, the 5′ leader sequence and/or 3′ trailer sequence is about 1 nucleotide to about 500 nucleotides in length. In some embodiments, the 5′ leader sequence and/or 3′ trailer sequence is about 1 nucleotide to about 400 nucleotides, about 1 nucleotide to about 300 nucleotides, about 1 nucleotide to about 200 nucleotides, about 1 nucleotide to about 100 nucleotides, about 1 nucleotide to about 75 nucleotides about 1 nucleotide to about 50 nucleotides, about 1 nucleotide to about 25 nucleotides, about 1 nucleotide to about 20 nucleotides, about 1 nucleotide to about 15 nucleotides, or about 1 nucleotide to about 10 nucleotides in length.

[0243] In some embodiments, the guide sequence has about 15 to about 30 nucleotides. In some embodiments, the guide sequence has about 19 to about 24 nucleotides. In some embodiments, the guide sequence has a nucleotide sequence set forth in Tables B1-B2. In some embodiments, the passenger sequence is 100% complementary to the guide sequence. In some embodiments, the passenger sequence is partially complementary to the guide sequence. In some embodiments, the passenger sequence comprises one to ten or one to five base mismatches or bulges relative to the guide sequence.

[0244] In some embodiments, the 5′ linker is 100% complementary to the 3′ linker.

[0245] In some embodiments, the terminal loop has about 4 nucleotides to about 1,000 nucleotides, about 4 nucleotides to about 900 nucleotides, about 4 nucleotides to about 800 nucleotides, about 4 nucleotides to about 700 nucleotides, about 4 nucleotides to about 600 nucleotides, about 4 nucleotides to about 500 nucleotides, about 4 nucleotides to about 400 nucleotides, about 4 nucleotides to about 300 nucleotides, about 4 nucleotides to about 200 nucleotides, about 4 nucleotides to about 100 nucleotides, about 4 nucleotides to about 90 nucleotides about 4 nucleotides to about 80 nucleotides, about 4 nucleotides to about 70 nucleotides, about 4 nucleotides to about 50 nucleotides, about 4 nucleotides to about 40 nucleotides, about 4 nucleotides to about 30 nucleotides, about 4 nucleotides to about 20 nucleotides, about 4 nucleotides to about 15 nucleotides, or about 4 nucleotides to about 10 nucleotides. Additional features of the double stranded RNA are described herein.

[0246] In some embodiments, the method comprises introducing a vector comprising a nucleic acid encoding the double stranded RNA into the mammalian cell. In some embodiments, the nucleic acid encoding the double stranded RNA is operably linked to a promoter. In some embodiments, the promoter is an RNA polymerase II promoter or an RNA polymerase III promoter.

[0247] In some embodiments, the siRNAs produced from the double stranded RNA in the mammalian cell and having 1-5 base mismatches relative to the CAG repeat region located at their predicted positions within positions 8-16 of the guide sequence are at an abundance of at least 10%, 15%, 20%, 25%, 30%, 35%, 40%, 45%, 50%, 55%, 60%, 65%, 70%, 75%, 80%, 85%, 90%, 95% or more of the siRNAs produced from the double stranded RNA by the mammalian cell. % abundance of a siRNA correctly processed from a double stranded RNA may be measured by obtaining the number of RNA sequence reads that have the correctly processed 5′ end and align to the reference CAG repeat region containing reference transcript, and dividing by the total number of RNA sequence reads of siRNAs aligned to the reference CAG repeat region containing reference transcript.

[0248] In some embodiments, the CAG repeat containing mRNA is HTT, Ataxin1, Ataxin2, Ataxin3, CACNA1A, Ataxin7, PPP2R2B, TBP, Androgen receptor, Atrophin, MLLT3, BMP2K, THAP11, ZFHX3, POU3F2, MAML2, SMARCA2, MAML3, ORC4, RUNX2, MED12, EP400, MAGI1, UMAD1, DM1-AS, AC007161.3, IRF2BPL, or MAB21L1. In some embodiments, the CAG repeat containing mRNA contains an expanded number of repeats.

[0249] In some embodiments, the mammalian cell is a CNS cell. In some embodiments, the mammalian cell is a non-neuronal cell or neuronal cell of the CNS. In some embodiments, the non-neuronal cell of the CNS is a glial cell, astrocyte, or microglial cell. In some embodiments, the mammalian cell is in vitro. In some embodiments, the mammalian cell is a non-CNS cell. In some embodiments, the mammalian cell is a fibroblast. In some embodiments, the mammalian cell is from a subject having one or more symptoms of a polyglutamine disease or suspected of having a polyglutamine disease or having a predisposition for a polyglutamine disease.

[0250] The present disclosure provides methods for reducing or inhibiting expression of a CAG repeat containing mRNA in a subject in need thereof, comprising administering to the subject a nucleic acid molecule (e.g., DNA) encoding a double stranded RNA of the disclosure, an expression cassette comprising the nucleic acid molecule encoding the double stranded RNA of the disclosure; a vector comprising the nucleic acid molecule encoding the double stranded RNA of the disclosure, or a pharmaceutical composition thereof.

[0251] In some embodiments, the inhibiting expression of a CAG repeat containing mRNA comprises inhibiting expression of the polyglutamine containing protein encoded by the CAG repeat containing mRNA, such as for example by binding to the CAG repeat region of a CAG repeat containing mRNA and blocking or repressing translation of the CAG repeat containing protein rather than by degradation of the CAG repeat containing mRNA.

[0252] In some embodiments, the CAG repeat containing mRNA or pre-mRNA is HTT, Ataxin1, Ataxin2, Ataxin3, CACNA1A, Ataxin7, PPP2R2B, TBP, Androgen receptor, Atrophin, MLLT3, BMP2K, THAP11, ZFHX3, POU3F2, MAML2, SMARCA2, MAML3, ORC4, RUNX2, MED12, EP400, MAGI1, UMAD1, DM1-AS, AC007161.3, IRF2BPL, or MAB21L1.

[0253] In some embodiments, the CAG repeat containing mRNA or pre-mRNA contains an expanded number of repeats. In some embodiments, the subject has a polyglutamine disease, meaning exhibiting symptoms of the polyglutamine disease. In some embodiments, the subject is at risk of developing a polyglutamine disease and does not yet show signs of the polyglutamine disease. In some embodiments, the polyglutamine disease is associated with HTT, Ataxin1, Ataxin2, Ataxin3, CACNA1A, Ataxin7, PPP2R2B, TBP, Androgen receptor, Atrophin, MLLT3, BMP2K, THAP11, ZFHX3, POU3F2, MAML2, SMARCA2, MAML3, ORC4, RUNX2, MED12, EP400, MAGI1, UMAD1, DM1-AS, AC007161.3, IRF2BPL, or MAB21L1. In some embodiments, the polyglutamine disease is a neurodegenerative disease. In some embodiments, the subject has Huntington's disease, spinocerebellar ataxia type 1, spinocerebellar ataxia type 2, spinocerebellar ataxia type 3, spinocerebellar ataxia type 6, spinocerebellar ataxia type 7, spinocerebellar ataxia type 12, spinocerebellar ataxia type 17, amyotrophic lateral sclerosis, spinal bulbar muscular atrophy, dentatorubral pallidoluysian atrophy, cleidocranial dysplasia, retinitis pigmentosa, myotonic dystrophy 1, or branchiootorenal syndrome 2, or is at risk of developing Huntington's disease, spinocerebellar ataxia type 1, spinocerebellar ataxia type 2, spinocerebellar ataxia type 3, spinocerebellar ataxia type 6, spinocerebellar ataxia type 7, spinocerebellar ataxia type 12, spinocerebellar ataxia type 17, amyotrophic lateral sclerosis, spinal bulbar muscular atrophy, dentatorubral pallidoluysian atrophy, cleidocranial dysplasia, retinitis pigmentosa, myotonic dystrophy 1, or branchiootorenal syndrome 2 and does not yet show signs of the disease.

[0254] The present disclosure also provides methods for treating a subject having a polyglutamine disease or at risk of developing a polyglutamine disease, comprising administering to the subject a nucleic acid molecule (e.g., DNA) encoding a double stranded RNA of the disclosure, an expression cassette comprising the nucleic acid molecule encoding the double stranded RNA of the disclosure; a vector comprising the nucleic acid molecule encoding the double stranded RNA of the disclosure, or a pharmaceutical composition thereof.

[0255] As used herein, the term “treat” refers to preventing or delaying onset of a polyglutamine disease; reducing severity of polyglutamine disease; reducing or preventing development of symptoms characteristic of polyglutamine disease; preventing worsening of symptoms characteristic of polyglutamine disease, or any combination thereof. In some embodiments, a treatment of a subject involves subjects having a polyglutamine disease or at risk of developing a polyglutamine disease and does not yet show signs of the polyglutamine disease.

[0256] In some embodiments, the methods for treatment of the present disclosure comprise administration as a monotherapy or in combination with one or more additional therapies for the treatment of the polyglutamine disease. Combination therapy may mean administration of the compositions of the present disclosure (e.g., a nucleic acid molecule (e.g., DNA) encoding a double stranded RNA of the disclosure, an expression cassette comprising the nucleic acid molecule encoding the double stranded RNA of the disclosure; a vector comprising the nucleic acid molecule encoding the double stranded RNA of the disclosure, or a pharmaceutical composition thereof) to the subject concurrently, prior to, subsequent to one or more additional therapies. Concurrent administration of combination therapy may mean that the compositions of the present disclosure (e.g., a nucleic acid molecule (e.g., DNA) encoding a double stranded RNA of the disclosure, an expression cassette comprising the nucleic acid molecule encoding the double stranded RNA of the disclosure; a vector comprising the nucleic acid molecule encoding the double stranded RNA of the disclosure, or a pharmaceutical composition thereof) and additional therapy are formulated for administration in the same dosage form or administered in separate dosage forms.

[0257] The present disclosure also provides methods of increasing abundance of a processed artificial miRNA that targets a CAG repeat containing RNA in a cell, wherein the artificial miRNA is encoded by a viral vector, comprising administering to the cell:

(a) a viral vector encoding a double stranded RNA according to any one of the embodiments described herein; or (b) a viral vector encoding an artificial miRNA according to any one of the embodiments described herein, wherein the artificial miRNA comprises a guide sequence, a passenger sequence, and optionally a terminal loop, wherein the guide sequence targets a CAG repeat region of a CAG repeat containing RNA and comprises 1-5 base mismatches relative to the CAG repeat region, wherein the base mismatches are located at positions 8-16 of the guide sequence.

[0258] In some embodiments, at least one mismatch relative to the CAG repeat region is located at positions 8-12 of the guide sequence. In some embodiments, at least one mismatch relative to the CAG repeat region is located at positions 9-11 of the guide sequence. In some embodiments, two or more of the mismatches relative to the CAG repeat region located at positions 8-16 of the guide sequence are contiguous.

[0259] In some embodiments, the guide sequence comprises or consists of a sequence selected from Tables B1-B2.

[0260] In some embodiments, the artificial miRNA further comprises a 5′ leader sequence and a 3′ trailer sequence. In some embodiments, the artificial miRNA comprises a 5′ leader sequence, a 3′ trailer sequence, and loop sequence selected from Table E.

[0261] In some embodiments, the CAG repeat containing RNA is an mRNA or pre-mRNA transcript. In some embodiments, the CAG repeat containing RNA is HTT, Ataxin1, Ataxin2, Ataxin3, CACNA1A, Ataxin7, PPP2R2B, TBP, Androgen receptor, Atrophin, MLLT3, BMP2K, THAP11, ZFHX3, POU3F2, MAML2, SMARCA2, MAML3, ORC4, RUNX2, MED12, EP400, MAGI1, UMAD1, DM1-AS, AC007161.3, IRF2BPL, or MAB21L1.

[0262] In some embodiments, the abundance of the processed artificial miRNA is at least about 10%, 15%, 20%, 25%, 30%, 35%, 40%, 45%, 50%, 55%, 60%, 65%, 70%, 75%, 80%, 85%, 90% or more. % abundance of a correctly processed artificial miRNA may be measured by obtaining the number of RNA sequence reads of artificial miRNAs that have the correctly processed 5′ end and align to the reference CAG repeat region containing reference transcript, and dividing by the total number of RNA sequence reads of artificial miRNAs aligned to the reference CAG repeat region containing reference transcript.

[0263] In some embodiments, the processed artificial miRNA targets a pathogenic or pathologic allele of a CAG repeat containing RNA. In some embodiments, the processed artificial miRNA selectively targets a pathogenic or pathologic allele of a CAG repeat containing RNA compared to a normal allele of a CAG repeat containing RNA. In some embodiments, the pathogenic or pathologic allele of the CAG repeat containing RNA contains at least 30 consecutive CAG repeats.

[0264] In some embodiments, the cell is in a subject. In some embodiments, the subject is human. In some embodiments, the subject has or is suspected of having a CAG repeat expansion disorder.

[0265] The present disclosure also provides methods of inhibiting expression of a CAG repeat containing RNA in a cell comprising administering to the cell: (a) a viral vector encoding a double stranded RNA according to any of the embodiments described herein; or (b) a viral vector encoding an artificial miRNA, wherein the artificial miRNA comprises a guide sequence, a passenger sequence, and optionally a terminal loop, wherein the guide sequence targets a CAG repeat region of a CAG repeat containing RNA and comprises 1-5 base mismatches relative to the CAG repeat region, wherein the base mismatches are located at positions 8-16 of the guide sequence.

[0266] In some embodiments, at least one mismatch relative to the CAG repeat region is located at positions 8-12 of the guide sequence. In some embodiments, at least one mismatch relative to the CAG repeat region is located at positions 9-11 of the guide sequence. In some embodiments, two or more of the mismatches relative to the CAG repeat region located at positions 8-16 of the guide sequence are contiguous. In some embodiments, the guide sequence comprises 3, 4, or 5 base mismatches relative to the CAG repeat region.

[0267] In some embodiments, the guide sequence comprises of consists of a sequence selected from Tables B1-B2.

[0268] In some embodiments, the artificial miRNA of C1(b) further comprises a 5′ leader sequence and a 3′ trailer sequence. In some embodiments, the artificial miRNA comprises a 5′ leader sequence, a 3′ trailer sequence, and loop sequence selected from Table E.

[0269] In some embodiments, the processed artificial miRNA targets a pathogenic or pathologic allele of a CAG repeat containing RNA. In some embodiments, the processed artificial miRNA selectively targets a pathogenic or pathologic allele of a CAG repeat containing RNA compared to a normal allele of a CAG repeat containing RNA. In some embodiments, the pathogenic or pathologic allele of the CAG repeat containing RNA contains at least 30 consecutive CAG repeats.

[0270] In some embodiments, the CAG repeat containing RNA is a mRNA or pre-mRNA transcript. In some embodiments, the CAG repeat containing RNA is HTT, Ataxin1, Ataxin2, Ataxin3, CACNA1A, Ataxin7, PPP2R2B, TBP, Androgen receptor, Atrophin, MLLT3, BMP2K, THAP11, ZFHX3, POU3F2, MAML2, SMARCA2, MAML3, ORC4, RUNX2, MED12, EP400, MAGI1, UMAD1, DM1-AS, AC007161.3, IRF2BPL, or MAB21L1.

[0271] In some embodiments, the guide sequence of the artificial miRNA has 0 predicted perfectly matching off-target transcripts. In some embodiments, the guide sequence of the artificial miRNA has 0-1 predicted off-target transcripts having perfect 17mer match within positions 1-21 of the guide sequence. In some embodiments, the guide sequence of the artificial miRNA has 0 predicted perfectly matching off-target transcripts. In some embodiments, the guide sequence of the artificial miRNA has 0-4 predicted off-target transcripts having perfect 17mer match within positions 1-21 of the guide sequence. In some embodiments, the guide sequence of the artificial miRNA with one substitution has 0-2 predicted off-target transcripts. In some embodiments, the guide sequence of the artificial miRNA has a predicted off-target transcript profile as set forth in Table B4.

[0272] In some embodiments, the cell is in a subject. In some embodiments, the subject is human. In some embodiments, the subject has or is suspected of having a CAG repeat expansion disorder.

[0273] In some embodiments, a subject treated in any of the methods described herein is a mammal (e.g., mouse, rat), preferably a primate (e.g., monkey, chimpanzee), or human.

[0274] In any of the methods of treatment described herein, a composition of the present disclosure (e.g., nucleic acid or expression cassette encoding a double stranded RNA, vector, or pharmaceutical composition according to the disclosure) may be administered to the subject by intrathecal, subpial, intraparenchymal, intrastriatal, intracranial, intracisternal, intra-cerebral, intracerebral ventricular, intraocular, intraventricular, intralumbar, intraocular, parenteral, intravenous, intramuscular, intra-arterial, subcutaneous, transdermal, interdermal, rectal, intravaginal, intraperitoneal, mucosal administration or any combination thereof.

[0275] In some embodiments, a composition of the present disclosure (e.g., inhibitory nucleic acid, isolated nucleic acid comprising an expression cassette encoding an inhibitory nucleic acid, vector, rAAV particle, pharmaceutical composition) is directly injected into the CNS of the subject. In some embodiments, direct injection into the CNS is intracerebral injection, intraparenchymal injection, intrathecal injection, subpial injection, or any combination thereof. In some embodiments, direct injection into the CNS is intracerebral ventricular injection. In some embodiments, direct injection into the CNS is direct injection into the cerebrospinal fluid (CSF) of the subject, optionally wherein the direct injection is intracisternal injection, intraventricular injection, intralumbar injection, or any combination thereof. In some embodiments, administration to the subject is accomplished by a combination of direct injection to the CNS and by a route that is not directly injected into the CNS (e.g., intravenously).

[0276] In some embodiments, the methods of the present disclosure reduce expression or activity of the CAG repeat containing RNA in a cell by at least 10%, at least 15%, at least 20%, at least 25%, at least 30%, at least 35%, at least 40%, at least 45%, at least 50%, at least 60%, at least 70%, at least 80%, at least 90% at least 95% or more in a cell compared to the expression level of the CAG repeat containing mRNA in a cell that has not been contacted with the double stranded RNA. In some embodiments, the methods of the present disclosure reduces the CAG repeat containing mRNA expression or activity in a cell by 10-20%, 10-30%, 10-40%, 10-50%, 10-60%, 10-70%, 10-80%, 10-90%, 10-95%, 20-30%, 20-40%, 20-50%, 20-60%, 20-70%, 20-80%, 20-90%, 20-95%, 20-100%, 30-40%, 30-50%, 30-60%, 30-70%, 30-80%, 30-90%, 30-95%, 30-100%, 40-50%, 40-60%, 40-70%, 40-80%, 40-90%, 40-95%, 40-100%, 50-60%, 50-70%, 50-80%, 50-90%, 50-95%, 50-100%, 60-70%, 60-80%, 60-90%, 60-95%, 60-100%, 70-80%, 70-90%, 70-95%, 70-100%, 80-90%, 80-95%, 80-100%, 90-95%, 90-100% compared to the expression level of the CAG repeat containing mRNA in a cell that has not been contacted with the double stranded RNA. In some embodiments, the methods of the present disclosure reduce expression or activity of the pathogenic or pathologic allele of the CAG repeat containing RNA. In some embodiments, the pathogenic or pathologic allele of the CAG repeat containing RNA contains at least 30 consecutive CAG repeats.

[0277] In some embodiments, the methods of the present disclosure reduce CAG repeat containing RNA expression or activity in the CNS of a subject by at least 10%, at least 15%, at least 20%, at least 25%, at least 30%, at least 35%, at least 40%, at least 45%, at least 50%, at least 55%, at least 60%, at least 65%, at least 70%, at least 75%, at least 80%, at least 85%, at least 90%, or at least 95% or more in the CNS compared to the expression level of the CAG repeat containing mRNA in the CNS of an untreated subject. In some embodiments, the methods of the present disclosure reduces CAG repeat containing mRNA expression or activity in the CNS of a subject by 10-20%, 10-30%, 10-40%, 10-50%, 10-60%, 10-70%, 10-80%, 10-90%, 10-95%, 20-30%, 20-40%, 20-50%, 20-60%, 20-70%, 20-80%, 20-90%, 20-95%, 20-100%, 30-40%, 30-50%, 30-60%, 30-70%, 30-80%, 30-90%, 30-95%, 30-100%, 40-50%, 40-60%, 40-70%, 40-80%, 40-90%, 40-95%, 40-100%, 50-60%, 50-70%, 50-80%, 50-90%, 50-95%, 50-100%, 60-70%, 60-80%, 60-90%, 60-95%, 60-100%, 70-80%, 70-90%, 70-95%, 70-100%, 80-90%, 80-95%, 80-100%, 90-95%, 90-100% compared to the expression level of the CAG repeat containing mRNA in the CNS of an untreated subject. In some embodiments, the methods of the present disclosure reduce expression or activity of the pathogenic or pathologic allele of the CAG repeat containing RNA in the CNS of a subject. In some embodiments, the pathogenic or pathologic allele of the CAG repeat containing RNA contains at least 30 consecutive CAG repeats.

[0278] In some embodiments, the methods of the present disclosure are used for selective reduction of expression or activity of the pathogenic or pathologic allele of a CAG repeat containing RNA (having an expanded CAG repeat in a cell). In some embodiments, the pathogenic or pathologic allele of the CAG repeat containing RNA contains at least 30 consecutive CAG repeats. In some embodiments, a selective reduction of the pathogenic or pathologic allele of the CAG repeat containing RNA is at least 1.1×, 1.2×, 1.3×, 1.4×, 1.5×, 1.6×, 1.7×, 1.8×, 1.9×, 2×, 3×, 4×, 5×, 6×, 7×, 8×, 9×, 10×, 20×, 30×, 40×, 50×, 60×, 70×, 80×, 90×, 100×, 200× or more compared to the reduction of expression of the normal (wildtype) allele of the CAG repeat containing RNA. In some embodiments, the CAG repeat containing RNA is selected from HTT, Ataxin 1, Ataxin 2, Ataxin 3, CACNA1A, Ataxin 7, PPP2R2B, TBP, Androgen receptor, Atrophin, MLLT3, BMP2K, THAP11, ZFHX3, POU3F2, MAML2, SMARCA2, MAML3, ORC4, RUNX2, MED12, EP400, MAGI1, UMAD1, DM1-AS, AC007161.3, IRF2BPL, and MAB21L1.

[0279] In some embodiments, the methods of the present disclosure are used for selective reduction of expression or activity of the pathogenic or pathologic allele of a CAG repeat containing RNA in the CNS of a subject. In some embodiments, the pathogenic or pathologic allele of the CAG repeat containing RNA contains at least 30 consecutive CAG repeats. In some embodiments, a selective reduction of the CAG repeat containing RNA having an expanded CAG repeat is at least 1.1×, 1.2×, 1.3×, 1.4×, 1.5×, 1.6×, 1.7×, 1.8×, 1.9×, 2× or more compared to the normal (wildtype) allele for the CAG repeat containing RNA. In some embodiments, the subject has or is suspected of having a CAG repeat expansion disease or disorder. In some embodiments, the CAG repeat containing RNA is selected from HTT, Ataxin 1, Ataxin 2, Ataxin 3, CACNA1A, Ataxin 7, PPP2R2B, TBP, Androgen receptor, Atrophin, MLLT3, BMP2K, THAP11, ZFHX3, POU3F2, MAML2, SMARCA2, MAML3, ORC4, RUNX2, MED12, EP400, MAGI1, UMAD1, DM1-AS, AC007161.3, IRF2BPL, and MAB21L1.

### Examples of Non-Limiting Aspects of the Disclosure

### Aspects Set A

[0280] Aspects, including embodiments, of the present subject matter described above may be beneficial alone or in combination, with one or more other aspects or embodiments. Without limiting the foregoing description, certain non-limiting aspects of the disclosure are provided below. As will be apparent to those of skill in the art upon reading this disclosure, each of the individually numbered aspects may be used or combined with any of the preceding or following individually numbered aspects. This is intended to provide support for all such combinations of aspects and is not limited to combinations of aspects explicitly provided below:

Aspect 1. A double stranded RNA comprising from 5′ to 3′:
[0281] (a) a 5′ leader sequence;
[0282] (b) a 5′ stem comprising a passenger sequence or a guide sequence;
[0283] (c) a 5′ linker of 1-6 bases;
[0284] (d) a terminal loop;
[0285] (e) a 3′ linker of 1-6 bases;
[0286] (f) a 3′ stem comprising:
   [0287] (i) a guide sequence if the 5′ stem comprises the passenger sequence; or
   [0288] (ii) a passenger sequence if the 5′ stem comprises the guide sequence; and
[0289] (g) a 3′ trailer sequence;
[0290] wherein the guide sequence targets a CAG repeat region of a CAG repeat containing RNA and comprises 1-5 base mismatches relative to the CAG repeat region, wherein the base mismatches are located at positions 8-16 of the guide sequence.
   Aspect 2. The double stranded RNA of aspect 1, wherein the double stranded RNA is contained within a pre-miRNA scaffold, pri-miRNA scaffold, or shRNA, optionally wherein the pre-miRNA scaffold or pri-miRNA scaffold is a mir-155 scaffold, a mir-33 scaffold, a mir-E scaffold, or any of the scaffolds set forth in Table E.
   Aspect 3. The double stranded RNA of aspect 1 or 2, wherein the 5′ leader sequence is not complementary to the 3′ trailer sequence.
   Aspect 4. The double stranded RNA of aspect 1 or 2, wherein the 5′ leader sequence is partially complementary to the 3′ trailer sequence.
   Aspect 5. The double stranded RNA of any one of aspects 1-4, wherein the 3′ trailer sequence comprises a polyU tail.
   Aspect 6. The double stranded RNA of aspect 5, wherein the polyU tail has 3 to 6 Us.
   Aspect 7. The double stranded RNA of any one of aspects 1-6, wherein the 5′ leader sequence and/or 3′ trailer sequence is about 1 nucleotide to about 500 nucleotides in length.
   Aspect 8. The double stranded RNA of aspect 7, wherein the 5′ leader sequence and/or 3′ trailer sequence is about 1 nucleotide to about 400 nucleotides, about 1 nucleotide to about 300 nucleotides, about 1 nucleotide to about 200 nucleotides, about 1 nucleotide to about 100 nucleotides, about 1 nucleotide to about 75 nucleotides about 1 nucleotide to about 50 nucleotides, about 1 nucleotide to about 25 nucleotides, about 1 nucleotide to about 20 nucleotides, about 1 nucleotide to about 15 nucleotides, or about 1 nucleotide to about 10 nucleotides in length.
   Aspect 9. The double stranded RNA of any one of aspects 1-8, wherein:
[0291] (i) the 5′ stem comprises the passenger sequence and the 5′ leader sequence comprises a portion of the 5′ end of the passenger sequence and/or the 3′ stem comprises the guide sequence 3′ trailer sequence comprises a portion of the 3′ end of the guide sequence; or
[0292] (ii) the 5′ stem comprises the guide sequence and the 5′ leader sequence comprises a portion of the 5′ end of the guide sequence and/or the 3′ stem comprises the passenger sequence 3′ trailer sequence comprises a portion of the 3′ end of the passenger sequence.
   Aspect 10. The double stranded RNA of any one of aspects 1-9, wherein the guide sequence has about 15 to about 30 nucleotides.
   Aspect 11. The double stranded RNA of aspect 10, wherein the guide sequence has about 19 to about 24 nucleotides.
   Aspect 12. The double stranded RNA of any one of aspects 1-11, wherein the guide sequence has a nucleotide sequence selected from Tables B1-B2.
   Aspect 13. The double stranded RNA of any one of aspects 1-12, wherein the passenger sequence is 100% complementary to the guide sequence.
   Aspect 14. The double stranded RNA of any one of aspects 1-12, wherein the passenger sequence is partially complementary to the guide sequence.
   Aspect 15. The double stranded RNA of aspect 14, wherein the passenger sequence comprises one to five base mismatches or bulges relative to the guide sequence.
   Aspect 16. The double stranded RNA of any one of aspects 1-15, wherein the 5′ linker is 100% complementary to the 3′ linker.
   Aspect 17. The double stranded RNA of any one of aspects 1-16, wherein the terminal loop has about 4 nucleotides to about 1,000 nucleotides, about 4 nucleotides to about 900 nucleotides, about 4 nucleotides to about 800 nucleotides, about 4 nucleotides to about 700 nucleotides, about 4 nucleotides to about 600 nucleotides, about 4 nucleotides to about 500 nucleotides, about 4 nucleotides to about 400 nucleotides, about 4 nucleotides to about 300 nucleotides, about 4 nucleotides to about 200 nucleotides, about 4 nucleotides to about 100 nucleotides, about 4 nucleotides to about 90 nucleotides about 4 nucleotides to about 80 nucleotides, about 4 nucleotides to about 70 nucleotides, about 4 nucleotides to about 50 nucleotides, about 4 nucleotides to about 40 nucleotides, about 4 nucleotides to about 30 nucleotides, about 4 nucleotides to about 20 nucleotides, about 4 nucleotides to about 15 nucleotides, or about 4 nucleotides to about 10 nucleotides.
   Aspect 18. The double stranded RNA of any one of aspects 1-17, wherein at least one mismatch relative to the CAG repeat region is located at positions 8-12 of the guide sequence.
   Aspect 19. The double stranded RNA of aspect 17, wherein at least one mismatch relative to the CAG repeat region is located at positions 9-11 of the guide sequence.
   Aspect 20. The double stranded RNA of any one of aspects 1-19, wherein two or more of the mismatches relative to the CAG repeat region located at positions 8-16 of the guide sequence are contiguous.
   Aspect 21. The double stranded RNA of any one of aspects 1-19, wherein at least one mismatch relative to the CAG repeat region located at positions 8-16 is not adjacent to another mismatch located at positions 8-16.
   Aspect 22. The double stranded RNA of any one of aspects 1-21, wherein the 1-5 base mismatches in the guide sequence do not base pair with the corresponding nucleotide(s) of the targeted CAG repeat region of the CAG repeat containing mRNA by Watson-Crick base pairing or by wobble base pairing.
   Aspect 23. The double stranded RNA of any one of aspects 1-22, wherein the double stranded RNA is cleaved to produce a shRNA comprising the guide sequence and the passenger sequence.
   Aspect 24. The double stranded RNA of aspect 23, wherein the double stranded RNA is cleaved by DROSHA to produce the shRNA.
   Aspect 25. The double stranded RNA of any one of aspects 1-24, wherein the double stranded RNA is cleaved to produce a small interfering RNA (siRNA) comprising the guide sequence and the passenger sequence.
   Aspect 26. The double stranded RNA of aspect 25, wherein the double stranded RNA is cleaved by DROSHA and DICER to produce the siRNA.
   Aspect 27. The double stranded RNA of aspect 25 or 26, wherein the guide sequence of the siRNA comprises 1-5 base mismatches relative to the CAG repeat region located at positions 8-16 of the guide sequence.
   Aspect 28. The double stranded RNA of aspect 23 or 24, wherein shRNA has an overhang at its 5′ end or at its 3′ end.
   Aspect 29. The double stranded RNA of aspect 23 or 24, wherein the 5′ overhang or 3′ overhang is about 1-6 nucleotides.
   Aspect 30. The double stranded RNA of aspect 23 or 24, wherein the shRNA does not have a 5′ overhang or 3′ overhang.
   Aspect 31. The double stranded RNA of aspect 23 or 24, wherein the shRNA has about 38 to about 50 nucleotides.
   Aspect 32. The double stranded RNA of any one of aspects 1-31, wherein the CAG repeat containing RNA is a mRNA or pre-mRNA transcript.
   Aspect 33. The double stranded RNA of any one of aspects 1-32, wherein the CAG repeat containing RNA is HTT, Ataxin1, Ataxin2, Ataxin3, CACNA1A, Ataxin7, PPP2R2B, TBP, Androgen receptor, Atrophin, MLLT3, BMP2K, THAP11, ZFHX3, POU3F2, MAML2, SMARCA2, MAML3, ORC4, RUNX2, MED12, EP400, MAGI1, UMAD1, DM1-AS, AC007161.3, IRF2BPL, or MAB21L1.
   Aspect 34. A double stranded RNA comprising:
[0293] A) from 5′ to 3′:
   [0294] (a) a 5′ leader sequence;
   [0295] (b) a 5′ stem comprising a passenger sequence or a guide sequence;
   [0296] (c) a 5′ linker;
   [0297] (d) a terminal loop;
   [0298] (e) a 3′ linker;
   [0299] (f) a 3′ stem comprising:
   [0300] (i) a guide sequence if the 5′ stem comprises the passenger sequence; or
   [0301] (ii) a passenger sequence if the 5′ stem comprises the guide sequence; and
[0302] (g) a 3′ trailer sequence;
[0303] wherein:
   [0304] (i) the guide sequence targets a CAG repeat region of a CAG repeat containing RNA and comprises 1-5 base mismatches relative to the CAG repeat region, and
   [0305] (ii) the double stranded RNA is cleaved to produce a small interfering RNA (siRNA) comprising the guide sequence and the passenger sequence, wherein the guide sequence of the siRNA comprises 1-5 base mismatches relative to the CAG repeat region located at positions 8-16 of the guide sequence of the siRNA; or
[0306] B) comprising from 5′ to 3′:
   [0307] (i) a guide sequence that targets a CAG repeat region of a CAG repeat containing RNA and comprises 1-5 base mismatches relative to the CAG repeat region; and
   [0308] (ii) a passenger sequence that is substantially complementary to the guide sequence, wherein
   [0309] the double stranded RNA is cleaved to produce a siRNA comprising the guide sequence and the passenger sequence, wherein the guide sequence of the siRNA comprises 1-5 base mismatches relative to the CAG repeat region located at positions 8-16 of the guide sequence of the siRNA.
      Aspect 35. The double stranded RNA of aspect 34, wherein the double stranded RNA is comprised in a pre-miRNA scaffold, pri-miRNA scaffold, or shRNA, optionally wherein the pre-miRNA scaffold or pri-miRNA scaffold is a mir-155 scaffold, a mir-33 scaffold, a mir-E scaffold, or any of the scaffolds set forth in Table E.
      Aspect 36. The double stranded RNA of aspect 34, wherein the double stranded RNA is cleaved by DROSHA and DICER to produce the siRNA.
      Aspect 37. The double stranded RNA of aspect 34 or 35, wherein the 5′ leader sequence is not complementary to the 3′ trailer sequence.
      Aspect 38. The double stranded RNA of aspect 34 or 35, wherein the 5′ leader sequence is partially complementary to the 3′ trailer sequence.
      Aspect 39. The double stranded RNA of any one of aspects 34-38, wherein the 3′ trailer sequence comprises a polyT tail.
      Aspect 40. The double stranded RNA of aspect 39, wherein the polyT tail has 3 to 6 Ts.
      Aspect 41. The double stranded RNA of any one of aspects 34-40, wherein the 5′ leader sequence and/or 3′ trailer sequence is about 1 nucleotide to about 500 nucleotides in length.
      Aspect 42. The double stranded RNA of aspect 41, wherein the 5′ leader sequence and/or 3′ trailer sequence is about 1 nucleotide to about 400 nucleotides, about 1 nucleotide to about 300 nucleotides, about 1 nucleotide to about 200 nucleotides, about 1 nucleotide to about 100 nucleotides, about 1 nucleotide to about 75 nucleotides about 1 nucleotide to about 50 nucleotides, about 1 nucleotide to about 25 nucleotides, about 1 nucleotide to about 20 nucleotides, about 1 nucleotide to about 15 nucleotides, or about 1 nucleotide to about 10 nucleotides in length.
      Aspect 43. The double stranded RNA of any one of aspects 34-42, wherein:
[0310] (i) the 5′ stem comprises the passenger sequence and the 5′ leader sequence comprises a portion of the 5′ end of the passenger sequence and/or the 3′ stem comprises the guide sequence 3′ trailer sequence comprises a portion of the 3′ end of the guide sequence; or
[0311] (ii) the 5′ stem comprises the guide sequence and the 5′ leader sequence comprises a portion of the 5′ end of the guide sequence and/or the 3′ stem comprises the passenger sequence 3′ trailer sequence comprises a portion of the 3′ end of the passenger sequence.
   Aspect 44. The double stranded RNA of any one of aspects 34-43, wherein the guide sequence has about 15 to about 30 nucleotides.
   Aspect 45. The double stranded RNA of aspect 44, wherein the guide sequence has about 19 to about 24 nucleotides.
   Aspect 46. The double stranded RNA of any one of aspects 34-45, wherein the guide sequence has a nucleotide sequence selected from Tables B1-B2.
   Aspect 47. The double stranded RNA of any one of aspects 34-46, wherein the passenger sequence is 100% complementary to the guide sequence.
   Aspect 48. The double stranded RNA of any one of aspects 34-46, wherein the passenger sequence is partially complementary to the guide sequence.
   Aspect 49. The double stranded RNA of aspect 48, wherein the passenger sequence comprises one to five base mismatches or bulges relative to the guide sequence.
   Aspect 50. The double stranded RNA of any one of aspects 34-49, wherein the 5′ linker has 1-6 bases and/or the 3′ linker has 1-6 bases.
   Aspect 51. The double stranded RNA of any one of aspects 34-50, wherein the 5′ linker is 100% complementary to the 3′ linker.
   Aspect 52. The double stranded RNA of any one of aspects 34-51, wherein the terminal loop has about 4 nucleotides to about 1,000 nucleotides, about 4 nucleotides to about 900 nucleotides, about 4 nucleotides to about 800 nucleotides, about 4 nucleotides to about 700 nucleotides, about 4 nucleotides to about 600 nucleotides, about 4 nucleotides to about 500 nucleotides, about 4 nucleotides to about 400 nucleotides, about 4 nucleotides to about 300 nucleotides, about 4 nucleotides to about 200 nucleotides, about 4 nucleotides to about 100 nucleotides, about 4 nucleotides to about 90 nucleotides about 4 nucleotides to about 80 nucleotides, about 4 nucleotides to about 70 nucleotides, about 4 nucleotides to about 50 nucleotides, about 4 nucleotides to about 40 nucleotides, about 4 nucleotides to about 30 nucleotides, about 4 nucleotides to about 20 nucleotides, about 4 nucleotides to about 15 nucleotides, or about 4 nucleotides to about 10 nucleotides.
   Aspect 53. The double stranded RNA of any one of aspects 34-52, wherein at least one mismatch relative to the CAG repeat region is located at positions 8-12 of the guide sequence of the siRNA.
   Aspect 54. The double stranded RNA of aspect 53, wherein at least one mismatch relative to the CAG repeat region is located at positions 9-11 of the guide sequence of the siRNA.
   Aspect 55. The double stranded RNA of any one of aspects 34-54, wherein two or more of the mismatches relative to the CAG repeat region located at positions 8-16 of the guide sequence of the siRNA are contiguous.
   Aspect 56. The double stranded RNA of any one of aspects 34-54, wherein at least one mismatch relative to the CAG repeat region located at positions 8-16 of the guide sequence of the siRNA is not adjacent to another mismatch located at positions 8-16 of the guide sequence of the siRNA.
   Aspect 57. The double stranded RNA of any one of aspects 34-56, wherein the 1-5 base mismatches in the guide sequence of the siRNA do not base pair with the corresponding nucleotide(s) of the targeted CAG repeat region of the CAG repeat containing mRNA by Watson-Crick base pairing or by wobble base pairing.
   Aspect 58. The double stranded RNA of any one of aspects 34-57, wherein the CAG repeat containing RNA is a mRNA or pre-mRNA transcript.
   Aspect 59. The double stranded RNA of any one of aspects 34-58, wherein the CAG repeat containing mRNA is HTT, Ataxin1, Ataxin2, Ataxin3, CACNA1A, Ataxin7, PPP2R2B, TBP, Androgen receptor, Atrophin, MLLT3, BMP2K, THAP11, ZFHX3, POU3F2, MAML2, SMARCA2, MAML3, ORC4, RUNX2, MED12, EP400, MAGI1, UMAD1, DM1-AS, AC007161.3, IRF2BPL, or MAB21L1.
   Aspect 60. A nucleic acid encoding the double stranded RNA of any one of aspects 1-59.
   Aspect 61. An expression cassette comprising the nucleic acid of aspect 60, operably linked to a promoter.
   Aspect 62. The expression cassette of aspect 61, wherein the promoter is an RNA polymerase promoter.
   Aspect 63. The expression cassette of aspect 62, wherein the RNA polymerase promoter is RNA polymerase II promoter or RNA polymerase III promoter.
   Aspect 64. The expression cassette of aspect 63, wherein the RNA polymerase III promoter is a U6, H1, or 7SK promoter.
   Aspect 65. The expression cassette of aspect 63, wherein the RNA polymerase II promoter is a U1, CMV, PGK, CAG, EIF1a, or synaptophysin promoter.
   Aspect 66. The expression cassette of any one of aspects 61-65, wherein the expression cassette is flanked by a 5′ adeno-associated virus (AAV) inverted terminal repeat (ITR) sequence and a 3′ AAV ITR sequence, or variants thereof.
   Aspect 67. The expression cassette of aspect 66, wherein one of the ITR sequences lacks a functional terminal resolution site.
   Aspect 68. The expression cassette of aspect 66 or 67, wherein the 5′ and 3′ ITRs are derived from an AAV serotype selected from the group consisting of: AAV1, AAV2, AAV5, AAV6, AAV6.2, AAV7, AAV8, AAV9, AAVRh10, AAV11, and variants thereof.
   Aspect 69. A vector comprising the nucleic acid molecule of aspect 60 or the expression cassette of any one of aspects 61-68.
   Aspect 70. The vector of aspect 79, wherein the vector is an adeno-associated virus (AAV) vector.
   Aspect 71. The AAV vector of aspect 70, further comprising a capsid protein, optionally wherein the capsid protein is an AAV1, AAV2, AAV5, AAV6, AAV6.2, AAV7, AAV8, AAV9, AAVRh10, or AAV11 capsid protein.
   Aspect 72. The AAV vector of aspect 70 or 71, wherein the AAV vector is a self-complementary AAV vector.
   Aspect 73. A pharmaceutical composition, or unit dosage form comprising the nucleic acid of aspect 60, the expression cassette of any one of aspects 61-68, or vector of any one of aspect 69-72, and a pharmaceutically acceptable carrier.
   Aspect 74. A method for reducing expression of a CAG repeat containing RNA in a subject in need thereof, comprising administering to the subject the nucleic acid of aspect 60, the expression cassette of any one of aspects 61-68, the vector of any one of aspect 69-72, or the pharmaceutical composition of aspect 73.
   Aspect 75. The method of aspect 74, wherein the inhibiting expression of a CAG repeat containing RNA comprises inhibiting expression of the polyglutamine containing protein encoded by the CAG repeat containing RNA.
   Aspect 76. The method of aspect 74 or 75, wherein the CAG repeat containing RNA is a mRNA or pre-mRNA transcript.
   Aspect 77. The method of any one of aspects 74-76, wherein the subject has or is suspected of having a polyglutamine disease, optionally wherein the polyglutamine disease is associated with: HTT, Ataxin1, Ataxin2, Ataxin3, CACNA1A, Ataxin7, PPP2R2B, TBP, Androgen receptor, Atrophin, MLLT3, BMP2K, THAP11, ZFHX3, POU3F2, MAML2, SMARCA2, MAML3, ORC4, RUNX2, MED12, EP400, MAGI1, UMAD1, DM1-AS, AC007161.3, IRF2BPL, or MAB21L1.
   Aspect 78. The method of aspect 77, wherein the polyglutamine disease is Huntington's disease, spinocerebellar ataxia type 1, spinocerebellar ataxia type 2, spinocerebellar ataxia type 3, spinocerebellar ataxia type 6, spinocerebellar ataxia type 7, spinocerebellar ataxia type 12, spinocerebellar ataxia type 17, amyotrophic lateral sclerosis, spinal bulbar muscular atrophy, dentatorubral pallidoluysian atrophy, cleidocranial dysplasia, retinitis pigmentosa, myotonic dystrophy 1, or branchiootorenal syndrome 2.
   Aspect 79. The method of any one of aspects 74-78, wherein the administration comprises direct injection to the central nervous system (CNS) of the subject.
   Aspect 80. The method of aspect 79, wherein the direct injection is intracerebral injection, intraparenchymal injection, intrathecal injection, intrastriatal injection, subpial injection, or any combination thereof.
   Aspect 81. The method of any one of aspects 74-78, wherein the administration comprises intraocular, parenteral, intravenous, intramuscular, intra-arterial, subcutaneous, transdermal, interdermal, rectal, intravaginal, intraperitoneal, or mucosal administration.
   Aspect 82. A method of inhibiting expression of a CAG repeat containing RNA in a mammalian cell comprising introducing into the mammalian cell a double stranded RNA comprising from 5′ to 3′:
[0312] (a) a 5′ leader sequence;
[0313] (b) a 5′ stem comprising a passenger sequence;
[0314] (c) a 5′ linker;
[0315] (d) a terminal loop;
[0316] (e) a 3′ linker;
[0317] (f) a 3′ stem comprising a guide sequence; and
[0318] (g) a 3′ trailer sequence;
[0319] wherein the guide sequence targets a CAG repeat region of a CAG repeat containing RNA; and
[0320] wherein the double stranded RNA is cleaved by the mammalian cell to produce a siRNA comprising the guide sequence and the passenger sequence, wherein the guide sequence of the siRNA comprises the 1-5 base mismatches relative to the CAG repeat region located at positions 8-16 of the guide sequence of the siRNA.
   Aspect 83. The method of aspect 82, wherein the inhibiting expression of a CAG repeat containing mRNA comprises inhibiting expression of the polyglutamine containing protein encoded by the CAG repeat containing mRNA.
   Aspect 84. The method of aspect 82, wherein the double stranded RNA is comprised in a pre-miRNA scaffold, pri-miRNA scaffold, or shRNA.
   Aspect 85. The method of aspect 82-84, wherein the double stranded RNA is cleaved by DROSHA and DICER in the mammalian cell to yield the siRNA.
   Aspect 86. The method of any one of aspects 82-85, wherein at least one mismatch relative to the CAG repeat region is located at positions 8-12 of the guide sequence of the siRNA.
   Aspect 87. The method of aspect 86, wherein at least one mismatch relative to the CAG repeat region is located at positions 9-11 of the guide sequence of the siRNA.
   Aspect 88. The method of any one of aspects 82-87, wherein two or more of the mismatches relative to the CAG repeat region located at positions 8-16 of the guide sequence of the siRNA are contiguous.
   Aspect 89. The method of any one of aspects 82-88, wherein at least one mismatch relative to the CAG repeat region located at positions 8-16 of the guide sequence of the siRNA is not adjacent to another mismatch located at positions 8-16 of the guide sequence of the siRNA.
   Aspect 90. The method of any one of aspects 82-89, wherein the 5′ leader sequence is not complementary to the 3′ trailer sequence.
   Aspect 91. The method of any one of aspects 82-89, wherein the 5′ leader sequence is partially complementary to the 3′ trailer sequence.
   Aspect 92. The method of any one of aspects 82-91, wherein the 3′ trailer sequence comprises a polyU tail.
   Aspect 93. The method of aspect 92, wherein the polyU tail has 3 to 6 uridines.
   Aspect 94. The method of any one of aspects 82-93, wherein the 5′ leader sequence and/or 3′ trailer sequence is about 1 nucleotide to about 500 nucleotides in length.
   Aspect 95. The method of aspect 94, wherein the 5′ leader sequence and/or 3′ trailer sequence is about 1 nucleotide to about 400 nucleotides, about 1 nucleotide to about 300 nucleotides, about 1 nucleotide to about 200 nucleotides, about 1 nucleotide to about 100 nucleotides, about 1 nucleotide to about 75 nucleotides about 1 nucleotide to about 50 nucleotides, about 1 nucleotide to about 25 nucleotides, about 1 nucleotide to about 20 nucleotides, about 1 nucleotide to about 15 nucleotides, or about 1 nucleotide to about 10 nucleotides in length.
   Aspect 96. The method of any one of aspects 82-95, wherein the guide sequence has about 15 to about 30 nucleotides.
   Aspect 97. The method of any one of aspects 82-95, wherein the guide sequence has about 19 to about 24 nucleotides.
   Aspect 98. The method of any one of aspects 82-97, wherein the guide sequence has a nucleotide sequence set selected from Tables B1-B2.
   Aspect 99. The method of any one of aspects 82-98, wherein the passenger sequence is 100% complementary to the guide sequence.
   Aspect 100. The method of any one of aspects 82-98, wherein the passenger sequence is partially complementary to the guide sequence.
   Aspect 101. The method of aspect 100, wherein the passenger sequence comprises one to five base mismatches or bulges relative to the guide sequence.
   Aspect 102. The method of any one of aspects 82-101, wherein the 5′ linker is 100% complementary to the 3′ linker.
   Aspect 103. The method of any one of aspects 82-102, wherein the terminal loop has about 4 nucleotides to about 1,000 nucleotides, about 4 nucleotides to about 900 nucleotides, about 4 nucleotides to about 800 nucleotides, about 4 nucleotides to about 700 nucleotides, about 4 nucleotides to about 600 nucleotides, about 4 nucleotides to about 500 nucleotides, about 4 nucleotides to about 400 nucleotides, about 4 nucleotides to about 300 nucleotides, about 4 nucleotides to about 200 nucleotides, about 4 nucleotides to about 100 nucleotides, about 4 nucleotides to about 90 nucleotides about 4 nucleotides to about 80 nucleotides, about 4 nucleotides to about 70 nucleotides, about 4 nucleotides to about 50 nucleotides, about 4 nucleotides to about 40 nucleotides, about 4 nucleotides to about 30 nucleotides, about 4 nucleotides to about 20 nucleotides, about 4 nucleotides to about 15 nucleotides, or about 4 nucleotides to about 10 nucleotides.
   Aspect 104. The method of any one of aspects 82-103, comprising introducing a vector comprising a nucleic acid encoding the double stranded RNA into the mammalian cell.
   Aspect 105. The method of aspect 104, wherein the nucleic acid encoding the double stranded RNA is operably linked to a promoter.
   Aspect 106. The method of aspect 105, wherein the promoter is an RNA polymerase II promoter of RNA polymerase III promoter.
   Aspect 107. The method of any one of aspects 82-106, wherein the siRNAs produced from the double stranded RNA in the mammalian cell and having 1-5 base mismatches relative to the CAG repeat region located at their predicted positions within positions 8-16 of the guide sequence are at an abundance of at least 10% of the siRNAs produced from the double stranded RNA by the mammalian cell.
   Aspect 108. The method of any one of aspects 82-107, wherein the CAG repeat containing RNA is a mRNA or pre-mRNA transcript.
   Aspect 109. The method of any one of aspects 82-108, wherein the CAG repeat containing RNA is HTT, Ataxin1, Ataxin2, Ataxin3, CACNA1A, Ataxin7, PPP2R2B, TBP, Androgen receptor, Atrophin, MLLT3, BMP2K, THAP11, ZFHX3, POU3F2, MAML2, SMARCA2, MAML3, ORC4, RUNX2, MED12, EP400, MAGI1, UMAD1, DM1-AS, AC007161.3, IRF2BPL, or MAB21L1.
   Aspect 110. A method of increasing abundance of a processed artificial miRNA that targets a CAG repeat containing RNA in a cell, wherein the artificial miRNA is encoded by a viral vector, comprising administering to the cell:
[0321] (a) a viral vector encoding a double stranded RNA according to any one of aspects 1-59; or
[0322] (b) a viral vector encoding the artificial miRNA, wherein the artificial miRNA comprises a guide sequence, a passenger sequence, and optionally a terminal loop, wherein the guide sequence targets a CAG repeat region of a CAG repeat containing RNA and comprises 1-5 base mismatches relative to the CAG repeat region, wherein the base mismatches are located at positions 8-16 of the guide sequence.
   Aspect 111. The method of aspect 110, wherein at least one mismatch relative to the CAG repeat region is located at positions 8-12 of the guide sequence.
   Aspect 112. The method of aspect 110, wherein at least one mismatch relative to the CAG repeat region is located at positions 9-11 of the guide sequence.
   Aspect 113. The method of any one of aspects 110-112, wherein two or more of the mismatches relative to the CAG repeat region located at positions 8-16 of the guide sequence are contiguous.
   Aspect 114. The method of any one of aspects 110-113, wherein the guide sequence comprises or consists of a sequence selected from Tables B1-B2.
   Aspect 115. The method of any one of aspects 110-114, wherein the artificial miRNA of aspect 110(b) further comprises a 5′ leader sequence and a 3′ trailer sequence.
   Aspect 116. The method of any one of aspects 110-115, wherein the artificial miRNA comprises a 5′ leader sequence, a 3′ trailer sequence, and loop sequence selected from Table E.
   Aspect 117. The method of any one of aspects 110-116, wherein the CAG repeat containing RNA is an mRNA or pre-mRNA transcript.
   Aspect 118. The method of any one of aspects 110-117, wherein the CAG repeat containing RNA is a pathologic allele of a CAG repeat containing gene.
   Aspect 119. The method of aspect 118, wherein the pathologic allele of the CAG repeat containing gene contains at least 30 consecutive CAG repeats.
   Aspect 120. The method of any one of aspects 110-119, wherein the CAG repeat containing RNA is HTT, Ataxin1, Ataxin2, Ataxin3, CACNA1A, Ataxin7, PPP2R2B, TBP, Androgen receptor, Atrophin, MLLT3, BMP2K, THAP11, ZFHX3, POU3F2, MAML2, SMARCA2, MAML3, ORC4, RUNX2, MED12, EP400, MAGI1, UMAD1, DM1-AS, AC007161.3, IRF2BPL, or MAB21L1.
   Aspect 121. The method of any one of aspects 110-120, wherein the abundance of the processed artificial miRNA is at least about 10%, 15%, 20%, 25%, 30%, 35%, 40%, 45%, 50%, 55%, 60%, 65%, 70%, 75%, 80%, 85%, 90% or more.
   Aspect 122. The method of any one of aspects 110-121, wherein the cell is in a subject.
   Aspect 123. The method of aspect 122, wherein the subject is human.
   Aspect 124. The method of aspect 123, wherein the subject has a CAG repeat expansion disorder.
   Aspect 125. A method of inhibiting expression of a CAG repeat containing RNA in a cell comprising administering to the cell:
[0323] (a) a viral vector encoding a double stranded RNA according to any one of aspects 1-59; or
[0324] (b) a viral vector encoding an artificial miRNA, wherein the artificial miRNA comprises a guide sequence, a passenger sequence, and optionally a terminal loop, wherein the guide sequence targets a CAG repeat region of a CAG repeat containing RNA and comprises 1-5 base mismatches relative to the CAG repeat region, wherein the base mismatches are located at positions 8-16 of the guide sequence.
   Aspect 126. The method of aspect 125, wherein at least one mismatch relative to the CAG repeat region is located at positions 8-12 of the guide sequence.
   Aspect 127. The method of aspect 125, wherein at least one mismatch relative to the CAG repeat region is located at positions 9-11 of the guide sequence.
   Aspect 128. The method of any one of aspects 125-127, wherein two or more of the mismatches relative to the CAG repeat region located at positions 8-16 of the guide sequence are contiguous.
   Aspect 129. The method of any one of aspects 125-128, wherein the guide sequence comprises 3, 4, or 5 base mismatches relative to the CAG repeat region.
   Aspect 130. The method of any one of aspects 125-129, wherein the guide sequence comprises or consists of a sequence selected from Tables B1-B2.
   Aspect 131. The method of any one of aspects 125-130, wherein the artificial miRNA of C1(b) further comprises a 5′ leader sequence and a 3′ trailer sequence.
   Aspect 132. The method of any one of aspects 125-131, wherein the artificial miRNA comprises a 5′ leader sequence, a 3′ trailer sequence, and loop sequence selected from Table E.
   Aspect 133. The method of any one of aspects 125-132, wherein the CAG repeat containing RNA is an mRNA or pre-mRNA transcript.
   Aspect 134. The method of any one of aspects 125-133, wherein the CAG repeat containing RNA is a pathologic allele of a CAG repeat containing gene.
   Aspect 135. The method of aspect 134, wherein the pathologic allele of the CAG repeat containing gene contains at least 30 consecutive CAG repeats.
   Aspect 136. The method of any one of aspects 125-135, wherein the CAG repeat containing RNA is HTT, Ataxin1, Ataxin2, Ataxin3, CACNA1A, Ataxin7, PPP2R2B, TBP, Androgen receptor, Atrophin, MLLT3, BMP2K, THAP11, ZFHX3, POU3F2, MAML2, SMARCA2, MAML3, ORC4, RUNX2, MED12, EP400, MAGI1, UMAD1, DM1-AS, AC007161.3, IRF2BPL, or MAB21L1.
   Aspect 137. The method of any one of aspects 125-136, wherein the guide sequence of the artificial miRNA has 0 predicted perfectly matching off-target transcripts.
   Aspect 138. The method of any one of aspects 125-137, wherein the guide sequence of the artificial miRNA has 0-1 predicted off-target transcripts having perfect 17mer match within positions 1-21.
   Aspect 139. The method of any one of aspects 125-138, wherein the guide sequence of the artificial miRNA has 0-2 predicted matching off-target transcripts with one mismatch.
   Aspect 140. The method of any one of aspects 125-139, wherein the guide sequence of the artificial miRNA has a predicted off-target transcript profile as set forth in Table B4.
   Aspect 141. The method of any one of aspects 125-140, wherein the cell is in a subject.
   Aspect 142. The method of aspect 141, wherein the subject is human.
   Aspect 143. The method of aspect 142, wherein the subject has a CAG repeat expansion disorder.
   Aspect 144. A method for treating a polyglutamine expansion disease in a subject in need thereof, comprising administering to the subject the nucleic acid of aspect 60, the expression cassette of any one of aspects 61-68, the vector of any one of aspect 69-72, or the pharmaceutical composition of aspect 73.
   Aspect 145. The method of aspect 144, wherein the polyglutamine expansion disease is associated with: HTT, Ataxin1, Ataxin2, Ataxin3, CACNA1A, Ataxin7, PPP2R2B, TBP, Androgen receptor, Atrophin, MLLT3, BMP2K, THAP11, ZFHX3, POU3F2, MAML2, SMARCA2, MAML3, ORC4, RUNX2, MED12, EP400, MAGI1, UMAD1, DM1-AS, AC007161.3, IRF2BPL, or MAB21L1.
   Aspect 146. The method of aspect 144, wherein the polyglutamine expansion disease is Huntington's disease, spinocerebellar ataxia type 1, spinocerebellar ataxia type 2, spinocerebellar ataxia type 3, spinocerebellar ataxia type 6, spinocerebellar ataxia type 7, spinocerebellar ataxia type 12, spinocerebellar ataxia type 17, amyotrophic lateral sclerosis, spinal bulbar muscular atrophy, dentatorubral pallidoluysian atrophy, cleidocranial dysplasia, retinitis pigmentosa, myotonic dystrophy 1, or branchiootorenal syndrome 2.
   Aspect 147. The method of any one of aspects 144-146, wherein the administration comprises direct injection to the central nervous system (CNS) of the subject.
   Aspect 148. The method of aspect 147, wherein the direct injection is intracerebral injection, intraparenchymal injection, intrathecal injection, intrastriatal injection, subpial injection, or any combination thereof.
   Aspect 149. The method of any one of aspects 144-146, wherein the administration comprises intraocular, parenteral, intravenous, intramuscular, intra-arterial, subcutaneous, transdermal, interdermal, rectal, intravaginal, intraperitoneal, or mucosal administration.

### Aspects Set B

[0325] Aspects, including embodiments, of the present subject matter described above may be beneficial alone or in combination, with one or more other aspects or embodiments. Without limiting the foregoing description, certain non-limiting aspects of the disclosure are provided below. As will be apparent to those of skill in the art upon reading this disclosure, each of the individually numbered aspects may be used or combined with any of the preceding or following individually numbered aspects. This is intended to provide support for all such combinations of aspects and is not limited to combinations of aspects explicitly provided below:

Aspect 1. A double-stranded RNA comprising
[0326] a) a first strand that hybridizes to a target CAG repeat region of a CAG repeat containing RNA; and
[0327] b) a second strand that hybridizes to the first strand,
[0328] wherein the first strand comprises:
   [0329] i) a first mismatch to the target CAG repeat region; and
   [0330] ii) at least a second mismatch to the target CAG repeat region,
[0331] wherein:
[0332] i) when the first mismatch is at position 8 based on the numbering of SEQ ID NO:743 (CUGCUGCUGCUGCUGCUGCUG (SEQ ID NO:743)), SEQ ID NO:866(GCUGCUGCUGCUGCUGCUGCU (SEQ ID NO:866)), or SEQ ID NO:867 (UGCUGCUGCUGCUGCUGCUGC (SEQ ID NO:867)), the second mismatch is from is from 1 to 8 bases 3′ of the first mismatch;
[0333] ii) when the first mismatch is at position 9 based on the numbering of SEQ ID NO:743 (CUGCUGCUGCUGCUGCUGCUG (SEQ ID NO:743)), SEQ ID NO:866 (GCUGCUGCUGCUGCUGCUGCU (SEQ ID NO:866)), or SEQ ID NO:867 (UGCUGCUGCUGCUGCUGCUGC (SEQ ID NO:867), the second mismatch is from 1 to 7 bases 3′ of the first mismatch;
[0334] iii) when the first mismatch is at position 10 based on the numbering of SEQ ID NO:743 (CUGCUGCUGCUGCUGCUGCUG (SEQ ID NO:743)), SEQ ID NO:866 (GCUGCUGCUGCUGCUGCUGCU (SEQ ID NO:866)), or (UGCUGCUGCUGCUGCUGCUGC (SEQ ID NO:867)), the second mismatch is from 1 to 6 bases 3′ of the first mismatch; and iv) when the first mismatch is at position 11 based on the numbering of SEQ ID NO:743 (CUGCUGCUGCUGCUGCUGCUG (SEQ ID NO:/743)), SEQ ID NO:866 (GCUGCUGCUGCUGCUGCUGCU (SEQ ID NO:866)), or (UGCUGCUGCUGCUGCUGCUGC (SEQ ID NO:867)), the second mismatch is from 1 to 5 bases 3′ of the first mismatch.
   Aspect 2. The double-stranded RNA of aspect 1, wherein each mismatch is generated by a substitution that is independently selected from:
[0335] a) a substitution of a G with an A, a U, or a C;
[0336] b) a substitution of a U with an A, a G, or a C;
[0337] c) a substitution of a C with an A, a U, or a G.
   Aspect 3. The double-stranded RNA of aspect 1 or aspect 2, wherein the first strand comprises:
[0338] i) a first mismatch to the target CAG repeat region, wherein the first mismatch is at position 8 based on the numbering of SEQ ID NO:743 (CUGCUGCUGCUGCUGCUGCUG (SEQ ID NO:743)), SEQ ID NO:866 (GCUGCUGCUGCUGCUGCUGCU (SEQ ID NO:866)), or SEQ ID NO:867 (UGCUGCUGCUGCUGCUGCUGC (SEQ ID NO:867)); and
[0339] ii) a second mismatch to the target CAG repeat region, wherein the second mismatch is from 1 to 8 bases 3′ of the first mismatch.
   Aspect 4. The double-stranded RNA of any one of aspects 1-3, wherein the first strand is a variant comprising at least a first and a second substitution of the nucleotide sequence: CUGCUGCUGCUGCUGCUGCUG (SEQ ID NO:743) wherein the first substitution generates the first mismatch and is at position 8 based on the numbering of CUGCUGCUGCUGCUGCUGCUG (SEQ ID NO:743) and the second substitution generates the second mismatch and is from 1 to 8 bases 3′ of the first mismatch.
   Aspect 5. The double-stranded RNA of any one of aspects 1-3, wherein the first strand is a variant comprising at least a first and a second substitution of the nucleotide sequence: GCUGCUGCUGCUGCUGCUGCU (SEQ ID NO:866), wherein the first substitution generates the first mismatch and is at position 8 based on the numbering of GCUGCUGCUGCUGCUGCUGCU (SEQ ID NO:866), and the second substitution generates the second mismatch and is from 1 to 8 bases 3′ of the first mismatch.
   Aspect 6. The double-stranded RNA of any one of aspects 1-3, wherein the first strand is a variant comprising at least a first and a second substitution of the nucleotide sequence: UGCUGCUGCUGCUGCUGCUGC (SEQ ID NO:867), wherein the first substitution generates the first mismatch and is at position 8 based on the numbering of UGCUGCUGCUGCUGCUGCUGC (SEQ ID NO:867), and the second substitution generates the second mismatch and is from 1 to 8 bases 3′ of the first mismatch.
   Aspect 7. The double-stranded RNA of any one of aspects 3-6, wherein the first strand comprises no more than 2 mismatches with the target CAG repeat region.
   Aspect 8. The double-stranded RNA of any one of aspects 3-6, wherein the first strand comprises no more than 3 mismatches with the target CAG repeat region.
   Aspect 9. The double-stranded RNA of any one of aspects 3-6, wherein the first strand comprises no more than 4 mismatches with the target CAG repeat region.
   Aspect 10. The double-stranded RNA of aspect 3 or aspect 4, wherein the first strand comprises a nucleotide sequence selected from:

i)
(SEQ ID NO: 317)
CUGCUGCAACUGCUGCUGCUG (CUG_NA_B);
ii)
(SEQ ID NO: 318)
CUGCUGCAGAUGCUGCUGCUG (CUG_NA_C);
iii)
(SEQ ID NO: 319)
CUGCUGCAGCAGCUGCUGCUG (CUG_NA_D);
iv)
(SEQ ID NO: 320)
CUGCUGCAGCUACUGCUGCUG(CUG_NA_E);
v)
(SEQ ID NO: 321)
CUGCUGCAGCUGAUGCUGCUG (CUG_NA_F);
vi)
(SEQ ID NO: 322)
CUGCUGCAGCUGCAGCUGCUG (CUG_NA_G);
vii)
(SEQ ID NO: 323)
CUGCUGCAGCUGCUACUGCUG (CUG_NA_H);
and
viii)
(SEQ ID NO: 324)
CUGCUGCAGCUGCUGAUGCUG (CUG_NA_I).

Aspect 11. The double-stranded RNA of aspect 3 or aspect 4, wherein the first strand comprises a nucleotide sequence selected from SEQ ID NOs:804-819.
Aspect 12. The double-stranded RNA of aspect 1 or aspect 2, wherein the first strand comprises a first mismatch to the target CAG repeat region, wherein the first mismatch is at position 8 based on the numbering of SEQ ID NO:743 (CUGCUGCUGCUGCUGCUGCUG (SEQ ID NO:743)), SEQ ID NO:866 (GCUGCUGCUGCUGCUGCUGCU (SEQ ID NO:866)), or SEQ ID NO:867 (UGCUGCUGCUGCUGCUGCUGC (SEQ ID NO:867)); wherein the first strand comprises a second mismatch and a third mismatch to the target CAG repeat region, and wherein the second and third mismatches are from 1 to 8 bases 3′ of the first mismatch.
Aspect 13. The double-stranded RNA of any one of aspects 1, 2, and 12, wherein the first strand is a variant comprising at least a first, a second, and a third substitution of the nucleotide sequence CUGCUGCUGCUGCUGCUGCUG (SEQ ID NO:743), wherein the first substitution generates the first mismatch and is at position 8 based on the numbering of CUGCUGCUGCUGCUGCUGCUG (SEQ ID NO:743), wherein the second substitution generates the second mismatch and the third substitution generates the third mismatch, and wherein the second substitution and the third substitution are from 1 to 8 bases 3′ of the first mismatch.
Aspect 14. The double-stranded RNA of any one of aspects 1, 2, and 12, wherein the first strand is a variant comprising at least a first, a second, and a third substitution of the nucleotide sequence GCUGCUGCUGCUGCUGCUGCU (SEQ ID NO:866), and wherein the first substitution generates the first mismatch and is at position 8 based on the numbering of GCUGCUGCUGCUGCUGCUGCU (SEQ ID NO:866), wherein the second substitution generates the second mismatch and the third substitution generates the third mismatch, and wherein the second substitution and the third substitution are from 1 to 8 bases 3′ of the first mismatch.
Aspect 15. The double-stranded RNA of any one of aspects 1, 2, and 12, wherein the first strand is a variant comprising at least a first, a second, and a third substitution of the nucleotide sequence UGCUGCUGCUGCUGCUGCUGC (SEQ ID NO:867), and wherein the first substitution generates the first mismatch and is at position 8 based on the numbering of UGCUGCUGCUGCUGCUGCUGC (SEQ ID NO:867), wherein the second substitution generates the second mismatch and the third substitution generates the third mismatch, and wherein the second substitution and the third substitution are from 1 to 8 bases 3′ of the first mismatch.
Aspect 16. The double-stranded RNA of any one of aspects 12-15, wherein the first strand comprises no more than 3 mismatches with the target CAG repeat region.
Aspect 17. The double-stranded RNA of any one of aspects 12-15, wherein the first strand comprises no more than 4 mismatches with the target CAG repeat region.
Aspect 18. The double-stranded RNA of aspect 1 or aspect 2, wherein the first strand comprises a first mismatch to the target CAG repeat region, wherein the first mismatch is at position 8 based on the numbering of SEQ ID NO:743 (CUGCUGCUGCUGCUGCUGCUG (SEQ ID NO:743)), SEQ ID NO:866 (GCUGCUGCUGCUGCUGCUGCU (SEQ ID NO:866)), or SEQ ID NO:867 (UGCUGCUGCUGCUGCUGCUGC (SEQ ID NO:867)); wherein the first strand comprises a second mismatch, a third mismatch, and a fourth mismatch to the target CAG repeat region, and wherein the second, third, and fourth mismatches are from 1 to 8 bases 3′ of the first mismatch.
Aspect 19. The double-stranded RNA of any one of aspects 1, 2, and 18, wherein the first strand is a variant comprising at least a first, a second, a third, and a fourth substitution of the nucleotide sequence CUGCUGCUGCUGCUGCUGCUG (SEQ ID NO:743), wherein the first substitution generates the first mismatch and is at position 8 based on the numbering of CUGCUGCUGCUGCUGCUGCUG (SEQ ID NO:743), wherein the second substitution generates the second mismatch, the third substitution generates the third mismatch, and the fourth substitution generates the fourth mismatch, and wherein the second, third, and fourth substitutions are from 1 to 8 bases 3′ of the first mismatch.
Aspect 20. The double-stranded RNA of any one of aspects 1, 2, and 18, wherein the first strand is a variant comprising at least a first, a second, a third, and a fourth substitution of the nucleotide sequence GCUGCUGCUGCUGCUGCUGCU (SEQ ID NO:866), wherein the first substitution generates the first mismatch and is at position 8 based on the numbering of GCUGCUGCUGCUGCUGCUGCU (SEQ ID NO:866), wherein the second substitution generates the second mismatch, the third substitution generates the third mismatch, and the fourth substitution generates the fourth mismatch, and wherein the second, third, and fourth substitutions are from 1 to 8 bases 3′ of the first mismatch.
Aspect 21. The double-stranded RNA of any one of aspects 1, 2, and 18, wherein the first strand is a variant comprising at least a first, a second, a third, and a fourth substitution of the nucleotide sequence UGCUGCUGCUGCUGCUGCUGC (SEQ ID NO:867), wherein the first substitution generates the first mismatch and is at position 8 based on the numbering of UGCUGCUGCUGCUGCUGCUGC (SEQ ID NO:867), wherein the second substitution generates the second mismatch, the third substitution generates the third mismatch, and the fourth substitution generates the fourth mismatch, and wherein the second, third, and fourth substitutions are from 1 to 8 bases 3′ of the first mismatch.
Aspect 22. The double-stranded RNA of any one of aspects 18-21, wherein the first strand comprises no more than 4 mismatches with the target CAG repeat region.
Aspect 23. The double-stranded RNA of aspect 1 or aspect 2, wherein the first strand comprises:
[0340] i) a first mismatch to the target CAG repeat region, wherein the first mismatch is at position 9 based on the numbering of SEQ ID NO:743 (CUGCUGCUGCUGCUGCUGCUG (SEQ ID NO:743)), SEQ ID NO:866 (GCUGCUGCUGCUGCUGCUGCU (SEQ ID NO:866)), or SEQ ID NO:867 (UGCUGCUGCUGCUGCUGCUGC (SEQ ID NO:867), and
[0341] ii) a second mismatch to the target CAG repeat region, wherein the second mismatch is from 1 to 7 bases 3′ of the first mismatch.
   Aspect 24. The double-stranded RNA of any one of aspects 1, 2, and 23, wherein the first strand is a variant comprising at least a first and a second substitution of the nucleotide sequence CUGCUGCUGCUGCUGCUGCUG (SEQ ID NO:743), wherein the first substitution generates the first mismatch and is at position 9 based on the numbering of CUGCUGCUGCUGCUGCUGCUG (SEQ ID NO:743), and the second substitution generates the second mismatch and is from 1 to 7 bases 3′ of the first mismatch.
   Aspect 25. The double-stranded RNA of any one of aspects 1, 2, and 23, wherein the first strand is a variant comprising at least a first and a second substitution of the nucleotide sequence GCUGCUGCUGCUGCUGCUGCU (SEQ ID NO:866), wherein the first substitution generates the first mismatch and is at position 9 based on the numbering of GCUGCUGCUGCUGCUGCUGCU (SEQ ID NO:866), and the second substitution generates the second mismatch and is from 1 to 7 bases 3′ of the first mismatch.
   Aspect 26. The double-stranded RNA of any one of aspects 1, 2, and 23, wherein the first strand is a variant comprising at least a first and a second substitution of the nucleotide sequence UGCUGCUGCUGCUGCUGCUGC (SEQ ID NO:867), wherein the first substitution generates the first mismatch and is at position 9 based on the numbering of UGCUGCUGCUGCUGCUGCUGC (SEQ ID NO:867), and the second substitution generates the second mismatch and is from 1 to 7 bases 3′ of the first mismatch.
   Aspect 27. The double-stranded RNA of aspect 23, wherein the first strand comprises a nucleotide sequence selected from SEQ ID NOs:298-304.
   Aspect 28. The double-stranded RNA of any one of aspects 23-27, wherein the first strand comprises no more than 2 mismatches with the target CAG repeat region.
   Aspect 29. The double-stranded RNA of any one of aspects 23-27, wherein the first strand comprises no more than 3 mismatches with the target CAG repeat region.
   Aspect 30. The double-stranded RNA of any one of aspects 23-27, wherein the first strand comprises no more than 4 mismatches with the target CAG repeat region.
   Aspect 31. The double-stranded RNA of aspect 1 or aspect 2, wherein the first mismatch is at position 9 based on the numbering of SEQ ID NO:743 (CUGCUGCUGCUGCUGCUGCUG (SEQ ID NO:743)), SEQ ID NO:866 (GCUGCUGCUGCUGCUGCUGCU (SEQ ID NO:866)), or SEQ ID NO:867 (UGCUGCUGCUGCUGCUGCUGC (SEQ ID NO:867), wherein the first strand comprises a second mismatch and a third mismatch to the target CAG repeat region, and wherein the second and third mismatches are from 1 to 7 bases 3′ of the first mismatch.
   Aspect 32. The double-stranded RNA of any one of aspects 1, 2, and 31, wherein the first strand is a variant comprising at least a first, a second, and a third substitution of the nucleotide sequence CUGCUGCUGCUGCUGCUGCUG (SEQ ID NO:743), wherein the first substitution generates the first mismatch and is at position 9 based on the numbering of CUGCUGCUGCUGCUGCUGCUG (SEQ ID NO:743), wherein the second substitution generates the second mismatch and the third substitution generates the third mismatch, and wherein the second substitution and the third substitution are from 1 to 7 bases 3′ of the first mismatch.
   Aspect 33. The double-stranded RNA of any one of aspects 1, 2, and 31, wherein the first strand is a variant comprising at least a first, a second, and a third substitution of the nucleotide sequence GCUGCUGCUGCUGCUGCUGCU (SEQ ID NO:866), wherein the first substitution generates the first mismatch and is at position 9 based on the numbering of GCUGCUGCUGCUGCUGCUGCU (SEQ ID NO:866), wherein the second substitution generates the second mismatch and the third substitution generates the third mismatch, and wherein the second substitution and the third substitution are from 1 to 7 bases 3′ of the first mismatch.
   Aspect 34. The double-stranded RNA of any one of aspects 1, 2, and 31, wherein the first strand is a variant comprising at least a first, a second, and a third substitution of the nucleotide sequence UGCUGCUGCUGCUGCUGCUGC (SEQ ID NO:867), wherein the first substitution generates the first mismatch and is at position 9 based on the numbering of UGCUGCUGCUGCUGCUGCUGC (SEQ ID NO:867), wherein the second substitution generates the second mismatch and the third substitution generates the third mismatch, and wherein the second substitution and the third substitution are from 1 to 7 bases 3′ of the first mismatch.
   Aspect 35. The double-stranded RNA of any one of aspects 31-34, wherein the first strand comprises no more than 3 mismatches with the target CAG repeat region.
   Aspect 36. The double-stranded RNA of any one of aspects 31-34, wherein the first strand comprises no more than 4 mismatches with the target CAG repeat region.
   Aspect 37. The double-stranded RNA of aspect 31, wherein the first strand comprises a nucleotide sequence selected from:

i)
(SEQ ID NO: 325)
CUGCUGCUAAAGCUGCUGCUG (CUG_307);
ii)
(SEQ ID NO: 326)
CUGCUGCUAAUACUGCUGCUG (CUG_334);
iii)
(SEQ ID NO: 327)
CUGCUGCUAAUGAUGCUGCUG (CUG_361);
iv)
(SEQ ID NO: 328)
CUGCUGCUAAUGCAGCUGCUG(CUG_388);
v)
(SEQ ID NO: 329)
CUGCUGCUAAUGCUACUGCUG (CUG_415);
vi)
(SEQ ID NO: 330)
CUGCUGCUACAGAUGCUGCUG (CUG_631);
vii)
(SEQ ID NO: 331)
CUGCUGCUACAGCAGCUGCUG (CUG_658);
viii)
(SEQ ID NO: 332)
CUGCUGCUACAGCUGAUGCUG (CUG_712);
ix)
(SEQ ID NO: 336)
CUGCUGCUAAUGCUGAUGCUG (CUG_442);
x)
(SEQ ID NO: 337)
CUGCUGCUACAACUGCUGCUG (CUG_604);
and
xi)
(SEQ ID NO: 338)
CUGCUGCUACAGCUACUGCUG (CUG_685).

Aspect 38. The double-stranded RNA of aspect 1 or aspect 2, wherein the first strand comprises a first mismatch to the target CAG repeat region, wherein the first mismatch is at position 9 based on the numbering of SEQ ID NO:743 (CUGCUGCUGCUGCUGCUGCUG (SEQ ID NO:743)), SEQ ID NO:866 (GCUGCUGCUGCUGCUGCUGCU (SEQ ID NO:866)), or SEQ ID NO:867 (UGCUGCUGCUGCUGCUGCUGC (SEQ ID NO:867), wherein the first strand comprises a second mismatch, a third mismatch, and a fourth mismatch to the target CAG repeat region, and wherein the second, third, and fourth mismatches are from 1 to 7 bases 3′ of the first mismatch.
Aspect 39. The double-stranded RNA of any one of aspects 1, 2, and 38, wherein the first strand is a variant comprising at least a first, a second, a third, and a fourth substitution of the nucleotide sequence CUGCUGCUGCUGCUGCUGCUG (SEQ ID NO:743), wherein the first substitution generates the first mismatch and is at position 9 based on the numbering of CUGCUGCUGCUGCUGCUGCUG (SEQ ID NO: 743), wherein the second substitution generates the second mismatch, the third substitution generates the third mismatch, and the fourth substitution generates the fourth mismatch, and wherein the second, third, and fourth substitutions are from 1 to 7 bases 3′ of the first mismatch.
Aspect 40. The double-stranded RNA of any one of aspects 1, 2, and 38, wherein the first strand is a variant comprising at least a first, a second, a third, and a fourth substitution of the nucleotide sequence GCUGCUGCUGCUGCUGCUGCU (SEQ ID NO:866), wherein the first substitution generates the first mismatch and is at position 9 based on the numbering of GCUGCUGCUGCUGCUGCUGCU (SEQ ID NO:866), wherein the second substitution generates the second mismatch, the third substitution generates the third mismatch, and the fourth substitution generates the fourth mismatch, and wherein the second, third, and fourth substitutions are from 1 to 7 bases 3′ of the first mismatch.
Aspect 41. The double-stranded RNA of any one of aspects 1, 2, and 38, wherein the first strand is a variant comprising at least a first, a second, a third, and a fourth substitution of the nucleotide sequence UGCUGCUGCUGCUGCUGCUGC (SEQ ID NO:867), wherein the first substitution generates the first mismatch and is at position 9 based on the numbering of UGCUGCUGCUGCUGCUGCUGC (SEQ ID NO:867), wherein the second substitution generates the second mismatch, the third substitution generates the third mismatch, and the fourth substitution generates the fourth mismatch, and wherein the second, third, and fourth substitutions are from 1 to 7 bases 3′ of the first mismatch.
Aspect 42. The double-stranded RNA of any one of aspects 38-41, wherein the first strand comprises no more than 4 mismatches with the target CAG repeat region.
Aspect 43. The double-stranded RNA of claim 38, wherein the first strand comprises a nucleotide sequence selected from SEQ ID NOs:341-344.
Aspect 44. The double-stranded RNA of claim 38, wherein the first strand comprises a nucleotide sequence selected from SEQ ID NOs:347-367.
Aspect 45. The double-stranded RNA of aspect 1 or aspect 2, wherein the first strand comprises:
[0342] i) a first mismatch to the target CAG repeat region, wherein the first mismatch is at position 10 based on the numbering of SEQ ID NO:743 (CUGCUGCUGCUGCUGCUGCUG (SEQ ID NO:743)), SEQ ID NO:866 (GCUGCUGCUGCUGCUGCUGCU (SEQ ID NO:866)), or (UGCUGCUGCUGCUGCUGCUGC (SEQ ID NO:867)); and
[0343] ii) a second mismatch to the target CAG repeat region, wherein the second mismatch is from 1 to 6 bases 3′ of the first mismatch.
   Aspect 46. The double-stranded RNA of any one of aspects 1, 2, or 45, wherein the first strand is a variant comprising at least a first and a second substitution of the nucleotide sequence CUGCUGCUGCUGCUGCUGCUG (SEQ ID NO:743), wherein the first substitution generates the first mismatch and is at position 10 based on the numbering of CUGCUGCUGCUGCUGCUGCUG (SEQ ID NO:743), and wherein the second substitution generates the second mismatch and is from 1 to 6 bases 3′ of the first mismatch.
   Aspect 47. The double-stranded RNA of any one of aspects 1, 2, or 45, wherein the first strand is a variant comprising at least a first and a second substitution of the nucleotide sequence GCUGCUGCUGCUGCUGCUGCU (SEQ ID NO:866), wherein the first substitution generates the first mismatch and is at position 10 based on the numbering of GCUGCUGCUGCUGCUGCUGCU (SEQ ID NO:866), and wherein the second substitution generates the second mismatch and is from 1 to 6 bases 3′ of the first mismatch.
   Aspect 48. The double-stranded RNA of any one of aspects 1, 2, or 45, wherein the first strand is a variant comprising at least a first and a second substitution of the nucleotide sequence UGCUGCUGCUGCUGCUGCUGC (SEQ ID NO:867), wherein the first substitution generates the first mismatch and is at position 10 based on the numbering of UGCUGCUGCUGCUGCUGCUGC (SEQ ID NO:867), and wherein the second substitution generates the second mismatch and is from 1 to 6 bases 3′ of the first mismatch.
   Aspect 49. The double-stranded RNA of any one of aspects 45-48, wherein the first strand comprises no more than 2 mismatches with the target CAG repeat region.
   Aspect 50. The double-stranded RNA of any one of aspects 45-48, wherein the first strand comprises no more than 3 mismatches with the target CAG repeat region.
   Aspect 51. The double-stranded RNA of any one of aspects 45-48, wherein the first strand comprises no more than 4 mismatches with the target CAG repeat region.
   Aspect 52. The double-stranded RNA of aspect 45, wherein the first strand comprises a nucleotide sequence selected from SEQ ID NOs:305-310.
   Aspect 53. The double-stranded RNA of aspect 1 or aspect 2, wherein the first mismatch is at position 10 based on the numbering of SEQ ID NO:743 (CUGCUGCUGCUGCUGCUGCUG (SEQ ID NO:743)), SEQ ID NO:866 (GCUGCUGCUGCUGCUGCUGCU (SEQ ID NO:866)), or (UGCUGCUGCUGCUGCUGCUGC (SEQ ID NO:867)), wherein the first strand comprises a second mismatch and a third mismatch to the target CAG repeat region, and wherein the second and third mismatches are from 1 to 6 bases 3′ of the first mismatch.
   Aspect 54. The double-stranded RNA of any one of aspects 1, 2, or 53, wherein the first strand is a variant comprising at least a first, a second, and a third substitution of the nucleotide sequence CUGCUGCUGCUGCUGCUGCUG (SEQ ID NO:743), wherein the first substitution generates the first mismatch and is at position 10 based on the numbering of CUGCUGCUGCUGCUGCUGCUG (SEQ ID NO:743), wherein the second substitution generates the second mismatch and the third substitution generates the third mismatch, and wherein the second substitution and the third substitution are from 1 to 6 bases 3′ of the first mismatch.
   Aspect 55. The double-stranded RNA of any one of aspects 1, 2, or 53, wherein the first strand is a variant comprising at least a first, a second, and a third substitution of the nucleotide sequence GCUGCUGCUGCUGCUGCUGCU (SEQ ID NO:866), wherein the first substitution generates the first mismatch and is at position 10 based on the numbering of GCUGCUGCUGCUGCUGCUGCU (SEQ ID NO:866), wherein the second substitution generates the second mismatch and the third substitution generates the third mismatch, and wherein the second substitution and the third substitution are from 1 to 6 bases 3′ of the first mismatch.
   Aspect 56. The double-stranded RNA of any one of aspects 1, 2, or 53, wherein the first strand is a variant comprising at least a first, a second, and a third substitution of the nucleotide sequence UGCUGCUGCUGCUGCUGCUGC (SEQ ID NO:867), wherein the first substitution generates the first mismatch and is at position 10 based on the numbering UGCUGCUGCUGCUGCUGCUGC (SEQ ID NO:867), wherein the second substitution generates the second mismatch and the third substitution generates the third mismatch, and wherein the second substitution and the third substitution are from 1 to 6 bases 3′ of the first mismatch.
   Aspect 57. The double-stranded RNA of any one of aspects 53-56, wherein the first strand comprises no more than 3 mismatches with the target CAG repeat region.
   Aspect 58. The double-stranded RNA of any one of aspects 53-56, wherein the first strand comprises no more than 4 mismatches with the target CAG repeat region.
   Aspect 59. The double-stranded RNA of aspect 53, wherein the first strand comprises a nucleotide sequence selected from:

i)
(SEQ ID NO: 333)
CUGCUGCUGAAGAUGCUGCUG (CUG_2116);
ii)
(SEQ ID NO: 334)
CUGCUGCUGAAGCAGCUGCUG (CUG_2143);
iii)
(SEQ ID NO: 335)
CUGCUGCUGAAGCUACUGCUG (CUG_2170);
iv)
(SEQ ID NO: 339)
CUGCUGCUGAAACUGCUGCUG (CUG_2089);
and
v)
(SEQ ID NO: 340)
CUGCUGCUGAAGCUGAUGCUG (CUG_2197).

Aspect 60. The double-stranded RNA of aspect 1 or aspect 2, wherein the first strand comprises a first mismatch to the target CAG repeat region, wherein the first mismatch is at position 10 based on the numbering of SEQ ID NO:743 (CUGCUGCUGCUGCUGCUGCUG (SEQ ID NO:743)), SEQ ID NO:866 (GCUGCUGCUGCUGCUGCUGCU (SEQ ID NO:866)), or (UGCUGCUGCUGCUGCUGCUGC (SEQ ID NO:867)), wherein the first strand comprises a second mismatch, a third mismatch, and a fourth mismatch to the target CAG repeat region, and wherein the second, third, and fourth mismatches are from 1 to 6 bases 3′ of the first mismatch.
Aspect 61. The double-stranded RNA of aspect 1, 2, or 60, wherein the first strand is a variant comprising at least a first, a second, a third, and a fourth substitution of the nucleotide sequence CUGCUGCUGCUGCUGCUGCUG (SEQ ID NO:743), wherein the first substitution generates the first mismatch and is at position 10 based on the numbering of CUGCUGCUGCUGCUGCUGCUG (SEQ ID NO:743), wherein the second substitution generates the second mismatch, the third substitution generates the third mismatch, and the fourth substitution generates the fourth mismatch, and wherein the second, third, and fourth substitutions are from 1 to 6 bases 3′ of the first mismatch.
Aspect 62. The double-stranded RNA of aspect 1, 2, or 60, wherein the first strand is a variant comprising at least a first, a second, a third, and a fourth substitution of the nucleotide sequence GCUGCUGCUGCUGCUGCUGCU (SEQ ID NO:866), wherein the first substitution generates the first mismatch and is at position 10 based on the numbering of CUGCUGCUGCUGCUGCUGCUG (SEQ ID NO:866), wherein the second substitution generates the second mismatch, the third substitution generates the third mismatch, and the fourth substitution generates the fourth mismatch, and wherein the second, third, and fourth substitutions are from 1 to 6 bases 3′ of the first mismatch.
Aspect 63. The double-stranded RNA of aspect 1, 2, or 60, wherein the first strand is a variant comprising at least a first, a second, a third, and a fourth substitution of the nucleotide sequence UGCUGCUGCUGCUGCUGCUGC (SEQ ID NO:867), wherein the first substitution generates the first mismatch and is at position 10 based on the numbering of UGCUGCUGCUGCUGCUGCUGC (SEQ ID NO:867), wherein the second substitution generates the second mismatch, the third substitution generates the third mismatch, and the fourth substitution generates the fourth mismatch, and wherein the second, third, and fourth substitutions are from 1 to 6 bases 3′ of the first mismatch.
Aspect 64. The double-stranded RNA of any one of aspects 60-63, wherein the first strand comprises no more than 4 mismatches with the target CAG repeat region.
Aspect 65. The double-stranded RNA of aspect 60, wherein the first strand comprises a nucleotide sequence selected from SEQ ID NOs:345, 346, and 368-375.
Aspect 66. The double-stranded RNA of aspect 1 or aspect 2, wherein the first strand comprises:
[0344] i) a first mismatch to the target CAG repeat region, wherein the first mismatch is at position 11 based on the numbering of SEQ ID NO:743 (CUGCUGCUGCUGCUGCUGCUG (SEQ ID NO:743)), SEQ ID NO:866 (GCUGCUGCUGCUGCUGCUGCU (SEQ ID NO:866)), or (UGCUGCUGCUGCUGCUGCUGC (SEQ ID NO:867)); and
[0345] ii) a second mismatch to the target CAG repeat region, wherein the second mismatch is from 1 to 5 bases 3′ of the first mismatch.
   Aspect 67. The double-stranded RNA of any one of aspects 1, 2, and 66, wherein the first strand is a variant comprising at least a first and a second substitution of the nucleotide sequence CUGCUGCUGCUGCUGCUGCUG (SEQ ID NO:743), wherein the first substitution generates the first mismatch and is at position 11 based on the numbering of CUGCUGCUGCUGCUGCUGCUG (SEQ ID NO:743), and the second substitution generates the second mismatch and is from 1 to 5 bases 3′ of the first mismatch.
   Aspect 68. The double-stranded RNA of any one of aspects 1, 2, and 66, wherein the first strand is a variant comprising at least a first and a second substitution of the nucleotide sequence GCUGCUGCUGCUGCUGCUGCU (SEQ ID NO:866), wherein the first substitution generates the first mismatch and is at position 11 based on the numbering of GCUGCUGCUGCUGCUGCUGCU (SEQ ID NO:866), and the second substitution generates the second mismatch and is from 1 to 5 bases 3′ of the first mismatch.
   Aspect 69. The double-stranded RNA of any one of aspects 1, 2, and 66, wherein the first strand is a variant comprising at least a first and a second substitution of the nucleotide sequence UGCUGCUGCUGCUGCUGCUGC (SEQ ID NO:867), wherein the first substitution generates the first mismatch and is at position 11 based on the numbering of UGCUGCUGCUGCUGCUGCUGC (SEQ ID NO:867), and the second substitution generates the second mismatch and is from 1 to 5 bases 3′ of the first mismatch.
   Aspect 70. The double-stranded RNA of any one of aspects 66-69, wherein the first strand comprises no more than 2 mismatches with the target CAG repeat region.
   Aspect 71. The double-stranded RNA of any one of aspects 66-69, wherein the first strand comprises no more than 3 mismatches with the target CAG repeat region.
   Aspect 72. The double-stranded RNA of any one of aspects 66-69, wherein the first strand comprises no more than 4 mismatches with the target CAG repeat region.
   Aspect 73. The double-stranded RNA of aspect 66, wherein the first strand comprises a nucleotide sequence selected from:

i)
(SEQ ID NO: 311)
CUGCUGCUGCAACUGCUGCUG (CUG_217);
ii)
(SEQ ID NO: 312)
CUGCUGCUGCAGAUGCUGCUG (CUG_226);
iii)
(SEQ ID NO: 313)
CUGCUGCUGCAGCAGCUGCUG (CUG_235);
iv)
(SEQ ID NO: 314)
CUGCUGCUGCAGCUACUGCUG (CUG_244);
and
v)
(SEQ ID NO: 315)
CUGCUGCUGCAGCUGAUGCUG (CUG_253).

Aspect 74. The double-stranded RNA of aspect 66, wherein the first strand comprises a nucleotide sequence selected from SEQ ID NOs:793-803.
Aspect 75. The double-stranded RNA of aspect 1 or aspect 2, wherein the first strand comprises a first mismatch to the target CAG repeat region, wherein the first mismatch is at position 11 based on the numbering of SEQ ID NO:743 (CUGCUGCUGCUGCUGCUGCUG (SEQ ID NO:743)), SEQ ID NO:866 (GCUGCUGCUGCUGCUGCUGCU (SEQ ID NO:866)), or (UGCUGCUGCUGCUGCUGCUGC (SEQ ID NO:867)); and wherein the first strand comprises a second mismatch and a third mismatch to the target CAG repeat region, and wherein the second and third mismatches are from 1 to 5 bases 3′ of the first mismatch.
Aspect 76. The double-stranded RNA of any one of aspects 1, 2, and 75, wherein the first strand is a variant comprising at least a first, a second, and a third substitution of the nucleotide sequence CUGCUGCUGCUGCUGCUGCUG (SEQ ID NO:743), wherein the first substitution generates the first mismatch and is at position 11 based on the numbering of CUGCUGCUGCUGCUGCUGCUG (SEQ ID NO:743), wherein the second substitution generates the second mismatch and the third substitution generates the third mismatch, and wherein the second substitution and the third substitution are from 1 to 5 bases 3′ of the first mismatch.
Aspect 77. The double-stranded RNA of any one of aspects 1, 2, and 75, wherein the first strand is a variant comprising at least a first, a second, and a third substitution of the nucleotide sequence GCUGCUGCUGCUGCUGCUGCU (SEQ ID NO:866), wherein the first substitution generates the first mismatch and is at position 11 based on the numbering of GCUGCUGCUGCUGCUGCUGCU (SEQ ID NO:866), wherein the second substitution generates the second mismatch and the third substitution generates the third mismatch, and wherein the second substitution and the third substitution are from 1 to 5 bases 3′ of the first mismatch.
Aspect 78. The double-stranded RNA of any one of aspects 1, 2, and 75, wherein the first strand is a variant comprising at least a first, a second, and a third substitution of the nucleotide sequence UGCUGCUGCUGCUGCUGCUGC (SEQ ID NO:867), wherein the first substitution generates the first mismatch and is at position 11 based on the numbering of UGCUGCUGCUGCUGCUGCUGC (SEQ ID NO:867), wherein the second substitution generates the second mismatch and the third substitution generates the third mismatch, and wherein the second substitution and the third substitution are from 1 to 5 bases 3′ of the first mismatch.
Aspect 79. The double-stranded RNA of any one of aspects 75-78, wherein the first strand comprises no more than 3 mismatches with the target CAG repeat region.
Aspect 80. The double-stranded RNA of any one of aspects 75-78, wherein the first strand comprises no more than 4 mismatches with the target CAG repeat region.
Aspect 81. The double-stranded RNA of aspect 1 or aspect 2, wherein the first strand comprises a first mismatch to the target CAG repeat region, wherein the first mismatch is at position 11 (CUGCUGCUGCUGCUGCUGCUG (SEQ ID NO:743)), SEQ ID NO:866 (GCUGCUGCUGCUGCUGCUGCU (SEQ ID NO:866)), or (UGCUGCUGCUGCUGCUGCUGC (SEQ ID NO:867)), wherein the first strand comprises a second mismatch, a third mismatch, and a fourth mismatch to the target CAG repeat region, and wherein the second, third, and fourth mismatches are from 1 to 5 bases 3′ of the first mismatch.
Aspect 82. The double-stranded RNA of any one of aspects 1, 2, and 81, wherein the first strand is a variant comprising at least a first, a second, a third, and a fourth substitution of the nucleotide sequence CUGCUGCUGCUGCUGCUGCUG (SEQ ID NO:743), wherein the first substitution generates the first mismatch and is at position 11 based on the numbering of CUGCUGCUGCUGCUGCUGCUG (SEQ ID NO:743), wherein the second substitution generates the second mismatch, the third substitution generates the third mismatch, and the fourth substitution generates the fourth mismatch, and wherein the second, third, and fourth substitutions are from 1 to 5 bases 3′ of the first mismatch.
Aspect 83. The double-stranded RNA of any one of aspects 1, 2, and 81, wherein the first strand is a variant comprising at least a first, a second, a third, and a fourth substitution of the nucleotide sequence GCUGCUGCUGCUGCUGCUGCU (SEQ ID NO:866), wherein the first substitution generates the first mismatch and is at position 11 based on the numbering of GCUGCUGCUGCUGCUGCUGCU (SEQ ID NO:866), wherein the second substitution generates the second mismatch, the third substitution generates the third mismatch, and the fourth substitution generates the fourth mismatch, and wherein the second, third, and fourth substitutions are from 1 to 5 bases 3′ of the first mismatch.
Aspect 84. The double-stranded RNA of any one of aspects 1, 2, and 81, wherein the first strand is a variant comprising at least a first, a second, a third, and a fourth substitution of the nucleotide sequence UGCUGCUGCUGCUGCUGCUGC (SEQ ID NO:867), wherein the first substitution generates the first mismatch and is at position 11 based on the numbering of UGCUGCUGCUGCUGCUGCUGC (SEQ ID NO:867), wherein the second substitution generates the second mismatch, the third substitution generates the third mismatch, and the fourth substitution generates the fourth mismatch, and wherein the second, third, and fourth substitutions are from 1 to 5 bases 3′ of the first mismatch.
Aspect 85. The double-stranded RNA of any one of aspects 81-84, wherein the first strand comprises no more than 4 mismatches with the target CAG repeat region.
Aspect 86. The double-stranded RNA of any one of aspects 1-85, wherein the second strand is 100% complementary to the first strand.
Aspect 87. The double-stranded RNA of any one of aspects 1-85, wherein the second strand comprises from 1 to 10 mismatches, from 3 to 5 mismatches, from 4 to 7 mismatches, or from 5 to 10 mismatches, to the first strand.
Aspect 88. The double-stranded RNA of any one of aspects 1-85, wherein the double-stranded RNA has a length of from 18 bases to 25 nucleotides, from 19 to 25 nucleotides, from 19 to 23 nucleotides, or from 19 to 21 nucleotides.
Aspect 89. The double-stranded RNA of any one of aspects 1-85, wherein the double-stranded RNA has a length of from 21 nucleotides to 25 nucleotides.
Aspect 90. A DNA molecule comprising a nucleotide sequence encoding the first strand as set forth in any one of aspects 1-89, wherein the nucleotide sequence is operably linked to a promoter that is functional in a eukaryotic cell.
Aspect 91. A recombinant nucleic acid comprising:
[0346] a1) the double-stranded RNA of any one of aspects 1-89; and
[0347] b1) a microRNA scaffold comprising a 5′ flanking polynucleotide, a loop polynucleotide, and a 3′ flanking polynucleotide,
[0348] wherein the recombinant nucleic acid comprises:
   [0349] i) the 5′ flanking polynucleotide;
   [0350] ii) the first strand of the double-stranded RNA;
   [0351] iii) the loop polynucleotide;
   [0352] iv) the second strand of the double-stranded RNA; and
   [0353] iv) the 3′ flanking polynucleotide;
[0354] wherein at least one of the 5′ flanking polynucleotide, the loop polynucleotide, and the 3′ flanking polynucleotide is heterologous to the first and/or the second strand of the double-stranded RNA; or
[0355] a2) the double-stranded RNA of any one of aspects 1-89; and
[0356] b2) a microRNA scaffold comprising a 5′ flanking polynucleotide, a loop polynucleotide, and a 3′ flanking polynucleotide,
[0357] wherein the recombinant nucleic acid comprises:
   [0358] i) the 5′ flanking polynucleotide;
   [0359] ii) the second strand of the double-stranded RNA;
   [0360] iii) the loop polynucleotide;
   [0361] iv) the first strand of the double-stranded RNA; and
   [0362] v) the 3′ flanking polynucleotide;
[0363] wherein at least one of the 5′ flanking polynucleotide, the loop polynucleotide, and the 3′ flanking polynucleotide is heterologous to the first and/or the second strand of the double-stranded RNA; or
[0364] a3) the double-stranded RNA of any one of aspects 1-89; and
[0365] b3) a microRNA scaffold comprising a 5′ flanking polynucleotide and a 3′ flanking polynucleotide,
[0366] wherein the recombinant nucleic acid comprises:
   [0367] i) the 5′ flanking polynucleotide;
   [0368] ii) the first strand of the double-stranded RNA;
   [0369] iii) the second strand of the double-stranded RNA; and
   [0370] iv) the 3′ flanking polynucleotide;
[0371] wherein one or both of the 5′ flanking polynucleotide and the 3′ flanking polynucleotide is heterologous to the first and/or the second strand of the double-stranded RNA; or
[0372] a4) the double-stranded RNA of any one of aspects 1-89; and
[0373] b4) a microRNA scaffold comprising a 5′ flanking polynucleotide and a 3′ flanking polynucleotide,
[0374] wherein the recombinant nucleic acid comprises:
   [0375] i) the 5′ flanking polynucleotide;
   [0376] ii) the second strand of the double-stranded RNA;
   [0377] iii) the first strand of the double-stranded RNA; and
   [0378] iv) the 3′ flanking polynucleotide;
[0379] wherein one or both of the 5′ flanking polynucleotide and the 3′ flanking polynucleotide is heterologous to the first and/or the second strand of the double-stranded RNA.
   Aspect 92. The recombinant nucleic acid of aspect 91, wherein the recombinant nucleic acid comprises:
[0380] a) the 5′ flanking polynucleotide;
[0381] b) the first strand of the double-stranded RNA;
[0382] c) the loop polynucleotide;
[0383] d) the second strand of the double-stranded RNA; and
[0384] e) the 3′ flanking polynucleotide.
   Aspect 93. The recombinant nucleic acid of aspect 91 or aspect 92, wherein the 5′ flanking polynucleotide, the loop polynucleotide, and the 3′ flanking polynucleotide are derived from miR33.
   Aspect 94. The recombinant nucleic acid of aspect 91, wherein the recombinant nucleic acid comprises:
[0385] a) the 5′ flanking polynucleotide;
[0386] b) the first strand of the double-stranded RNA;
[0387] c) the second strand of the double-stranded RNA; and
[0388] d) the 3′ flanking polynucleotide.
   Aspect 95. The recombinant nucleic acid of aspect 91 or aspect 94, wherein the 5′ flanking polynucleotide and the 3′ flanking polynucleotide are derived from miR451.
   Aspect 96. A DNA molecule comprising a nucleotide sequence encoding a recombinant nucleic acid according to any one of aspects 91-95.
   Aspect 97. The DNA molecule of aspect 96, wherein the 5′ flanking polynucleotide is encoded by the nucleotide sequence: tgcacacctcctggcgggcagctctg (SEQ ID NO:738).
   Aspect 98. The DNA molecule of aspect 96 or aspect 97, wherein the loop polynucleotide is encoded by the nucleotide sequence: tgttctggcaatacctg (SEQ ID NO:739).
   Aspect 99. The DNA molecule of any one of aspects 96-98, wherein the 3′ flanking polynucleotide is encoded by the nucleotide sequence: gggaggcctgccctgactgcccac (SEQ ID NO:740).
   Aspect 100. The DNA molecule of any one of aspects 96-99, comprising the nucleotide sequence set forth in any one of SEQ ID NOs:579-656.
   Aspect 101. The DNA molecule of aspect 96, wherein the 5′ flanking polynucleotide is encoded by the nucleotide sequence acctactgactgccagggcacttgggaatggcaagg (SEQ ID NO:854).
   Aspect 102. The DNA molecule of aspect 96 or aspect 101, wherein the 3′ flanking polynucleotide is encoded by the nucleotide sequence tcttgctatacccagaaaacgtgccaggaagagaac (SEQ ID NO:855).
   Aspect 103. The DNA molecule of aspect 96, wherein:
[0389] i) the 5′ flanking polynucleotide is encoded by the nucleotide sequence acctactgactgccagggcacttgggaatggcaagg (SEQ ID NO:854);
[0390] ii) the 3′ flanking polynucleotide is encoded by the nucleotide sequence tcttgctatacccagaaaacgtgccaggaagagaac (SEQ ID NO:855); and
[0391] iii) the first strand or the second strand is encoded by the nucleotide sequence set forth in any one of SEQ ID NOs:379-456.
   Aspect 104. The DNA molecule of aspect 96, wherein the 5′ flanking polynucleotide is encoded by the nucleotide sequence set forth in SEQ ID NO:856.
   Aspect 105. The DNA molecule of aspect 96 or aspect 104, wherein the 3′ flanking polynucleotide is encoded by the nucleotide sequence set forth in SEQ ID NO:857.
   Aspect 106. The DNA molecule of aspect 96, wherein:
[0392] i) the 5′ flanking polynucleotide is encoded by the nucleotide sequence set forth in SEQ ID NO:856;
[0393] ii) the 3′ flanking polynucleotide is encoded by the nucleotide sequence set forth in SEQ ID NO:857; and
[0394] iii) the first strand or the second strand is encoded by the nucleotide sequence set forth in any one of SEQ ID NOs:379-456.
   Aspect 107. The DNA molecule of aspect 96, wherein the 5′ flanking polynucleotide is encoded by the nucleotide sequence set forth in SEQ ID NO:858.
   Aspect 108. The DNA molecule of aspect 96 or aspect 107, wherein the 3′ flanking polynucleotide is encoded by the nucleotide sequence set forth in SEQ ID NO:859.
   Aspect 109. The DNA molecule of aspect 96, wherein:
[0395] i) the 5′ flanking polynucleotide is encoded by the nucleotide sequence set forth in SEQ ID NO:858;
[0396] ii) the 3′ flanking polynucleotide is encoded by the nucleotide sequence set forth in SEQ ID NO:859; and
[0397] iii) the first strand or the second strand is encoded by the nucleotide sequence set forth in any one of SEQ ID NOs:379-456.
   Aspect 110. A recombinant expression vector comprising the DNA molecule of any one of aspects 96 to 109.
   Aspect 111. The recombinant expression vector of aspect 110, wherein the nucleotide sequence is operably linked to a promoter that is functional in a eukaryotic cell.
   Aspect 112. The recombinant expression vector of aspect 111, wherein the promoter is an RNA polymerase II promoter or an RNA polymerase III promoter.
   Aspect 113. The recombinant expression vector of aspect 111 or aspect 112, wherein the promoter is a CAG promoter, a CBA promoter, a CMV promoter, a U6 promoter, an EF1α promoter, or an H1 promoter.
   Aspect 114. The recombinant expression vector of any one of aspects 110-113, wherein the recombinant expression vector comprises a 5′ adeno-associated virus (AAV) inverted terminal repeat (ITR) sequence and a 3′ AAV ITR sequence.
   Aspect 115. A recombinant expression vector comprising a nucleotide sequence encoding the recombinant nucleic acid of any one of aspects 91-95.
   Aspect 116. The recombinant expression vector of aspect 115, wherein the nucleotide sequence is operably linked to a promoter that is functional in a eukaryotic cell.
   Aspect 117. The recombinant expression vector of aspect 116, wherein the promoter is an RNA polymerase II promoter or an RNA polymerase III promoter.
   Aspect 118. The recombinant expression vector of aspect 116 or aspect 117, wherein the promoter is a CAG promoter, a CBA promoter a CMV promoter, a U6 promoter, an EF1α promoter, or an H1 promoter.
   Aspect 119. The recombinant expression vector of any one of aspects 115-118, wherein the recombinant expression vector comprises a 5′ adeno-associated virus (AAV) inverted terminal repeat (ITR) sequence and a 3′ AAV ITR sequence.
   Aspect 120. A delivery vehicle comprising the recombinant expression vector of any one of aspects 110-119.
   Aspect 121. The delivery vehicle of aspect 120, wherein the delivery vehicle a non-viral delivery vehicle.
   Aspect 122. The delivery vehicle of aspect 121, wherein the delivery vehicle is a lipid nanoparticle.
   Aspect 123. The delivery vehicle of aspect 120, wherein the delivery vehicle is a viral particle.
   Aspect 124. A viral particle comprising the recombinant expression vector of any one of aspects 110-119.
   Aspect 125. The viral particle of aspect 126, wherein the viral particle is an adeno-associated virus (AAV) particle.
   Aspect 126. The viral particle of aspect 125, wherein the AAV particle comprises an AAV9 capsid.
   Aspect 127. The viral particle of aspect 125, wherein the AAV particle comprises an AAV2 capsid.
   Aspect 128. A composition comprising:
[0398] a) the recombinant expression vector of any one of aspects 110-119; and
[0399] b) a pharmaceutically acceptable excipient.
   Aspect 129. A composition comprising:
[0400] a) the delivery vehicle of any one of aspects 120-123; and
[0401] b) a pharmaceutically acceptable excipient.
   Aspect 130. A composition comprising:
[0402] a) a viral particle comprising the recombinant expression vector of any one of aspects 124-127; and
[0403] b) a pharmaceutically acceptable excipient.
   Aspect 131. A method for selectively reducing translation of a disease-associated CAG repeat-containing RNA in an individual having a CAG repeat expansion disorder, the method comprising administering to the individual an effective amount of the expression vector of any one of aspects 110-119, delivery vehicle of any one of aspects 120-123, the viral particle of any one of aspects 124-127, or the pharmaceutical composition of any one of aspects 128-130.
   Aspect 132. The method of aspect 131, wherein the repeat expansion disorder is Huntington's disease, spinocerebellar ataxia type 1, spinocerebellar ataxia type 2, spinocerebellar ataxia type 3, spinocerebellar ataxia type 6, spinocerebellar ataxia type 7, spinocerebellar ataxia type 12, spinocerebellar ataxia type 17, spinal and bulbar muscular atrophy, dentatorubral pallidoluysian atrophy, or cleidocranial dysplasia.
   Aspect 133. The method of aspect 131 or aspect 132, wherein said administering comprises direct injection to the central nervous system of the individual.
   Aspect 134. The method of aspect 133, wherein the direct injection is intracerebral ventricular injection, intraparenchymal injection, intrathecal injection, intrastriatal injection, intrathalamic injection, intracisternal magna injection, subpial injection, or any combination thereof.
   Aspect 135. The method of any one of aspects 131-134, wherein said administering provides for a ratio of a polypeptide encoded by the non-disease-associated CAG repeat-containing RNA to a polypeptide encoded by disease-associated CAG repeat-containing RNA of greater than 1.0.
   Aspect 136. The method of any one of aspects 131-134, wherein said administering provides for a ratio of a polypeptide encoded by non-disease-associated CAG repeat-containing RNA to a polypeptide encoded by disease-associated CAG repeat-containing RNA of from 1.1 to 1.8.
   Aspect 137. The method of any one of aspects 131-134, wherein said administering provides for a ratio of a polypeptide encoded by non-disease-associated CAG repeat-containing RNA to a polypeptide encoded by disease-associated CAG repeat-containing RNA of greater than 1.8.

### EXAMPLES

### Materials and Methods

Cloning of CAG Repeat-Targeted shRNA Expression Vectors

[0404] Lentiviral pLKO.1-TRC shRNA expression vector was obtained from Addgene (10878) and EGFP inserted upstream of the puromycin resistance gene separated by a T2A polypeptide linker. Additionally, an XhoI restriction site downstream of the shRNA cloning site was mutated. This custom vector, pxTRC-EGFP-puro, was subsequently digested with EcoRI and AgeI to release a 1.9 kb stuffer sequence, treated with FastAP (Thermo Fisher) to dephosphorylate, then gel-purified. The linearized and purified vector was then used to add shRNA inserts, which were purchased from Integrated DNA Technologies (IDT) as single strands and annealed into duplexes. Duplexes were designed to possess an additional 16 bps on each end that matched the pxTRC-EGFP-puro vector immediately upstream and downstream of the AgeI and EcoRI restriction enzyme cut sites to enable recombination-based cloning with In-Fusion (Takara Bio).

[0405] Ligated plasmids were transformed into NEB Stable chemically competent cells (New England Biolabs) and grown on LB-agar-carbenicillin plates at 30° C. Individual colonies were grown in liquid culture in LB-carbenicillin at 30° C., extracted with standard mini-prep or midi-prep procedures, and positive clones confirmed by Sanger sequencing.

Next-Generation Sequencing of Expressed shRNAs

[0406] shRNA expression vectors (500 ng) were electroporated into 30-40,000 cells with a Neon Transfection System (Invitrogen) and grown at 37° C. in 5% CO₂ for 84 h. Human embryonic Kidney (HEK) 293T cells (ATCC) were grown in Eagle's minimum essential medium (EMEM) supplemented with 1× non-essential amino acids (NEAA) (Thermo Fisher), 5% fetal bovine serum (FBS), and 5% cosmic calf serum (CCS) while patient-derived fibroblasts (Coriell Cell Repository, GM04281) were grown in EMEM supplemented with 20% FBS, 1 mM sodium pyruvate, and 1×NEAA. Cells were harvested by trypsinization and processed for small RNA extraction using the mirVana miRNA Isolation Kit (Invitrogen) following the manufacturer's recommended protocol. RNA was quantified by UV spectrophotometry with a Nanodrop instrument and sent for sequencing at a core facility. Small RNAs were sequenced by Illumina after preparation with a TruSeq Small RNA Library kit. Small RNA sequencing results were analyzed by a custom bioinformatic workflow. Briefly, data was first converted to a fastq file and run through Trimmomatic using the following command line:
[0407] java -jar trimmomatic-0.39.jar SE -threads 12 -trimlog shC9-2_trimlog.txt /.fastq ILLUMINACLIP:QIAseq.fa:2:30:10 LEADING:3 TRAILING:3 SLIDINGWINDOW:4:15 MINLEN:15

[0408] Reference FASTA files were created for the first and second halves of the designed shRNA called A strand (5′ arm) and B strand (3′ arm). These reference sequences for each shRNA arm sequence included up to 10 additional nucleotides of flanking sequence. The reference FASTA files were assigned to their respective strand directory and the trimmed fastq was inserted in each strand folder. The command bowtie-build -r reference_list.fasta reference_list was used in each reference folder to create three reference FASTA files for each strand. The command line bowtie -S -p 12 -v 1 -a --best ref trim_.fastq>sam_trim_fastq.sam was used in each strand directory to create .sam files. Tablet software was used to create tablet files from each strand by opening a new assembly and aligning the .sam file and the reference FASTA file. Tablet .txt files were obtained for both A and B strands for each sample.

[0409] A custom excel file was created to analyze each tablet file. Each strand was analyzed in separate tabs of excel. The tablet file was pasted into excel where it read start position, end position, and length of each shRNA reported. A table of read lengths and total reads was created from the tablet file. A bar graph was created to report percentage of reads for each read length listed out of the total number of reads reported. Then a table was created to build potential shRNA reads beginning from start position 1 of the reference sequence and ending with the final start position possible for the reference strand length. A similar table was created that listed potential shRNA reads using the end positions from the tablet file. Then a table was created to analyze specific shRNA reads with exact start and end positions.

### Generation of Luciferase-Based Model Cells for CAG Repeat-Containing Gene Expression

[0410] To create a rapid surrogate assay for measuring relative knock-down of huntingtin (HTT) wild-type (wt) and mutant (mut) protein expression, HTT exon 1 fragments of wt and mut mRNA were cloned from the cDNA of patient-derived fibroblasts (GM04281). These contained the exon 1 sequence upstream of the CAG repeat, the CAG repeat itself, followed by a short fragment of the exon 1 sequence downstream of the repeat. These clones were designed to contain different peptide tags (HA and FLAG tags) on the wt and mut variants via PCR and then cloned into a vector upstream of and in-frame with an mCherry reporter protein in a pINC3G vector. The inducible Tet-on promoter was replaced with CMV a promoter and, a firefly luciferase gene was inserted downstream of and in-frame with the mCherry gene via a T2A linker. All vectors were confirmed by Sanger sequencing.

Luciferase Activity Assays for shRNA Activity

[0411] Luciferase assays were established and performed by co-transfecting HEK293T cells on 24-well plates with 50.0 ng of HTT wt or mut luciferase, 5.0 ng RSV-Renilla (Promega), and 12.5 ng indicated shRNA-expressing constructs. Forty-eight hr after transfection, dual luciferase reporter assays were performed to determine the knockdown efficiency of the designed shRNAs. Firefly luciferase values were first normalized to Renilla luciferase values and then compared to scramble shRNA controls. Luciferase experiments were performed at least 3 times and statistical analysis was performed using two-way ANOVA followed by Tukey's post hoc test.

### Western Blot Analyses for Knockdown of Mutant and Wildtype Huntingtin in Patient-Derived Cells

[0412] Western blot assays were performed essentially as previously reported (Hu et al., 2009; Gagnon et al., 2010). Briefly, cells were harvested by trypsinization, protein extracted with a cell lysis buffer and centrifugation, and protein quantified by BCA or Bradford assay. Protein samples (12-15 ug) were separated by SDS-PAGE on 5% (50:1 acrylamide:bis-acrylamide) tris-acetate gels using Novex Tris-Acetate SDS Running Buffer (Invitrogen). Gels were typically resolved for 6-8 h at 100-120 volts at 4-10° C. HTT proteins were transferred to Hybond-C Extra (Amersham Biosciences) nitrocellulose for 2.5-3 h. HTT protein bands were detected with anti-HTT primary antibody (MAB2166, Chemicon) at 1:5000 dilution and anti-mouse HRP conjugate antibody (Jackson Immunoresearch) at 1:5000 dilution. Tubulin loading controls were performed on a separate gel via standard procedures. Protein was visualized by chemiluminescence on an iBright imager (Thermo Fisher) or by exposure to film. Total HTT protein levels were first normalized to tubulin loading control levels, then normalized to treatment controls before plotting. Quantification was performed with ImageJ and data plotted with Prism software using a Hill plot equation.

Packaging of shRNA Lentiviral and Adeno-Associated Virus (AAV) Particles

[0413] To generate lentiviral particles, HEK293T cells on 100 mm plates (˜60% confluent) were transfected with CMV-VSV-G (Addgene #8454), CMV-dR8.2 dvpr (Addgene #8454), and the pLKO1 shRNA lentiviral construct. Forty-eight hours after transfection, lentiviral particle-containing media was removed from cells, filtered to remove cell debris, and centrifuged at 70,000×g for 2 hours to concentrate the lentiviral particles. Lentiviral particles were suspended in PBS and stored at −80° C. To generate AAV-particles, U6 promoter driven shRNAs were sublconed downstream of the bGH poly A signal in pAAV-CAG-Emerald plasmid (plasmid backbone pAAV-MCS, Takara) using PCR. HEK293T cells were transfected with pHelper (Takara), pAAV-DJ (Cell Biolabs Inc.), and indicated shRNA-expressing pAAV CAG-Emerald plasmids. Seventy-two hr after transfection AAV particles were extracted from cells using AAVpro Extraction Solution (Takara). Viral genome content was determined by qPCR using primers that amplify a region with the ITR.

### Example 1: Optimizing Expression and Processing of CAG Repeat-Targeted shRNAs

[0414] shRNAs were cloned into a U6 promoter-driven expression vector following a modification of a previously reported protocol (Moffat et al., 2006). The expression vector was customized by including an EGFP gene upstream of the puromycin resistance gene to help monitor transfection efficiency by fluorescence, resulting in the vector pxTRC-EGFP-puro (FIG. 1A). Two shRNAs were cloned using the expression and processing scaffold of the original pxTRC-EGFP-puro vector (Moffat et al., 2006). These were shHD1 and shHD1-L, which were designed to either match perfectly or contain three central mismatches (positions 10-12) to the target, respectively. Control shRNAs that target endogenous PARP1 (shPARP), HTT protein outside of the CAG repeat (shHD2.4), and a non-targeting shRNA against mCherry (shMChry) were also cloned (Table 1).

TABLE 1
CAG Repeat-Targeting shRNA Cloning Inserts

| shRNA | | |
|---|---|---|
| name | shRNA cloning insert sequence (5′-3′) | Scaffold |
| shHD1 | GTGGAAAGGACGAAACA ccgg CAGCAGCAGCAGCAGCAGCAG | pTRC Pol III |
| | ctcgag CTGCTGCTGCTGCTGCTGCTG tttttg | |
| | AATTCTCGACCTCGAGACAA [SEQ ID NO: 51] | |
| shHD1L | GTGGAAAGGACGAAACA ccgg CAGCAGCAGTTTCAGCAGCAG | pTRC Pol III |
| | ctcgag CTGCTGCTGAAACTGCTGCTG tttttg | |
| | AATTCTCGACCTCGAGACAA [SEQ ID NO: 52] | |
| shPARP | GTGGAAAGGACGAAACA ccgg CCGAGAAATCTCTTACCTCAA | pTRC Pol III |
| | ctcgag TTGAGGTAAGAGATTTCTCGG tttttg | |
| | AATTCTCGACCTCGAGACAA [SEQ ID NO: 53] | |
| shHD2.4 | GTGGAAAGGACGAAACA ccgg GACCGTGTGAATCATTGTCTA | pTRC Pol III |
| | ctcgag TAGACAATGATTCACACGGTC tttttg | |
| | AATTCTCGACCTGGTGACAA [SEQ ID NO: 54] | |
| shMChry | GTGGAAAGGACGAAACA ccgg GAGGATAACTCGGCCATAATA | pTRC Pol III |
| | ctcgag TATTATGGCCGAGTTATCCTC tttttg | |
| | AATTCTCGACCTGGTGACAA [SEQ ID NO: 55] | |
| shHD1-1 | GTGGAAAGGACGAAACA cc GCAGCAGCAGCAGCAGCAG CAGC | modified pTRC |
| | acctgc GCTG CTGCTGCTGCTGCTGCTGC tttttg | Pol III |
| | AATTCTCGACCTGGTGACAA [SEQ ID NO: 56] | |
| shHD1L-1 | GTGGAAAGGACGAAACA cc GCAGCAGCTCTAGCAGCAG CAGC | modified pTRC |
| | acctgc GCTG CTGCTGCTAGAGCTGCTGC tttttg | Pol III |
| | AATTCTCGACCTGGTGACAA [SEQ ID NO: 57] | |
| shHD1L-1a | GTGGAAAGGACGAAACA cc CAGCAGCACAAGCAGCAG CAGC | modified pTRC |
| | ctcgag GCT GCTGCTGCAAATGCTGCTG tttttg | Pol III |
| | AATTCTCGACCTGGTGACAA [SEQ ID NO: 58] | |
| shHD1L-1b | GTGGAAAGGACGAAACA cc GCAGCAGCCAAAGCAGCAG CAGC | modified pTRC |
| | gtgaagccacagatg GCTG CTGCTGCTAAAGCTGCTGC tttttg | Pol III |
| | AATTCTCGACCTGGTGACAA [SEQ ID NO: 59] | |
| shHD1L-1c | GTGGAAAGGACGAAACA cc GCAGCAGCCAAAGCAGCAG CAGC | modified pTRC |
| | gttctggcaatacct GCTG CTGCTGCTAAAGCTGCTGC tttttg | Pol III |
| | AATTCTCGACCTGGTGACAA [SEQ ID NO: 60] | |
| shHD1L-1d | GTGGAAAGGACGAAACA cc CTGCTGCTAAAGCTGCTG CTGC | modified pTRC |
| | ctcgag GCA GCAGCAGCCAAAGCAGCAG tttttg | Pol III |
| | AATTCTCGACCTGGTGACAA [SEQ ID NO: 61] | |
| shMCHR-1 | GTGGAAAGGACGAAACA ccgg GAGGATAACTCGGCCATAATA CG | modified pTRC |
| | acctgc GCta TTATGGCCGAGTTATCCTC tttttg | Pol III |
| | AATTCTCGACCTGGTGACAA [SEQ ID NO: 62] | |

Bold uppercase sequence matches target cloning vector for recombination-based cloning. Italic sequence represents expected mature guide and passenger strands of mature duplex RNA. Underlined sequence represents mismatched sequence compared to potential targets or deviations from repeat sequence. Lowercase sequence represents internal loop of shRNA hairpin. Only the sense strand of a duplex DNA insert is shown.

[0415] Prior to proceeding with experimental target knock-down studies, next-generation small RNA sequencing was performed after transfection of shPARP, shHD1, and shHD1L into patient-derived Huntington disease (HD) fibroblast cells. Sequencing revealed imperfect processing of shRNAs that shifted the expected 5′ end of the guide strand (the 3′ shRNA hairpin arm) by 3 nucleotides into the seed region toward the 3′ end for all three shRNAs (FIG. 1B). While this likely results in functional shRNAs for perfectly matched targets like PARP-1, it placed mismatches at positions 7-9 for shHD1-L instead of 10-12. Since the seed region of small RNAs loaded into Argonaute enzymes ranges from position 1-8, this would partially disrupt seed pairing and efficient binding to the targeted CAG repeat. In addition, the perfectly matched shHD1 revealed very low abundance for the mature guide strand (Table 2). The repetitive nature and high GC-content of an shHD1 hairpin during Drosha processing likely interferes with accurate processing due to ambiguous shifting of the hairpin structure and therefore processing register. These results suggested that introduction of unique, non-repetitive sequence in the hairpin, such as the three tandem adenosines that were added to create mismatches during target binding for shHD1-L, is beneficial by creating a predictable RNA hairpin fold and processing register.

TABLE 2
Processing Accuracy and Efficiency of shRNAs

| shRNA Name | Mismatches | | Guide RNA | |
|---|---|---|---|---|
| (CAG repeat | (passenger, | | 5′ | Relative |
| targeted) | guide) | Design | Processing | Abundance |
| shHD1 | none | XhoI loop | 20% | very low |
| shHD1-1 | none | ACCTGC loop | 50% | low |
| shHD1L-1 | (9-11, 9-11) | no central bulge | 97% | high |
| shHD1L-1a | (9-11, 9-11) | central bulge | 55% | low |
| shHD1L-1b | (9-11, 9-11) | central bulge, | 95% | high |
| | | miR30 loop | | |
| shHD1L-1c | (9-11, 9-11) | central bulge, | 95% | high |
| | | miR33 loop | | |
| shHD1L-1d | (9-11, 9-11) | central bulge, | 95% | very low |
| | | arm swap | | |
| shHD-33part | (9-11, 9-11) | central bulge, miR33 | 25% | very low |
| | | part scaffold | | |
| shHD-33part-3′k | (9-11, 9-11) | 3′ arm kink, | 3% | very low |
| | | miR33 part | | |
| shHD-33full | (9-11, 9-11) | central bulge, miR33 | 90% | high |
| | | full scaffold, arm swap | | |
| shHD-33full- | (9-11, 7-11) | miR33 bulge, | 85% | high |
| mimic | | miR33 full scaffold | | |

[0416] To correct for shifted guide RNA processing patterns in CAG repeat-targeted shRNAs, two new shRNAs, shHD1-1 and shHD1L-1 were designed. These designs adjusted flanking sequence to accommodate the implied cleavage and processing patterns of Drosha and Dicer. The first few nucleotides upstream and downstream of the hairpin arms were adjusted such that they did not pair (C-T mismatches), added a short 4 nucleotide linker between each arm and the internal loop, and changed the loop to an asymmetric sequence predicted to generate a well-defined 6-nucleotide loop (FIG. 1C). Also, shRNAs were transfected into HEK 293T cells, which provide higher small RNA yields for sequencing. These changes appeared to largely correct the processing defects and generate relatively abundant, mature shRNAs with the desired cleavage patterns. For the shHD1L-1 shRNA, -97% of guide strands were accurately processed with a perfectly complementary seed region at positions 1-8 and properly placed central mismatches (designed to be at positions 9-11) (FIG. 1D, Table 2). For shHD1-1, however, the abundance of the guide strand was still low despite correctly shifted processing patterns (Table 2). Thus, GC-rich repetitive shRNAs may pose challenges for Drosha or Dicer processing due to their stability and ability to shift pairing register between the two hairpin arms.

[0417] To explore new designs based on this modified scaffold, four additional CAG repeat-targeted shRNAs, shHD1L-1a through shHD1L-1d, were cloned (Table 1). These designs included intentional mismatches at the center of the shRNA hairpin itself to generate more natural miRNA-like structures, in addition to changing loops and swapping hairpin arm sequences. The shHD1L-1a design replaced the asymmetric loop with the palindromic loop used in the original design. Sequencing revealed that the original asymmetric loop was a potential source of low yield and improper processing as this design produced heterogeneity in the 5′ end of the guide strand and reduced overall abundance (Table 2). The internal loop was then replaced with native miR30 and miR33 loops for shHD1L-1b and shHD1L-1c, respectively. Both of these designs rescued processing back to high abundance and very high processing accuracy (Table 2). Finally, shHD1L-1d was designed for the guide strand to be processed from the 5′ arm of the hairpin. This arm swap resulted in similar processing defects as seen for shHD1L-1a, such as poor processing predictability, reduced abundance, and a common 1-nucleotide shift toward the 3′ end of the guide strand.

[0418] Many therapeutic shRNAs are designed to be embedded within a natural miRNA scaffold. Therefore, a miR33 scaffold was selected for central mismatch CAG repeat-targeted shRNAs (Xie et al., 2020) (FIGS. 2A-2B). Designs included a partial miR33 flanking scaffold (shHD-33part), a partial scaffold with a hairpin kink (shHD-33part-3′k), a full miR33 flanking scaffold (shHD-33full), and a full scaffold with the hairpin structure designed to also mimic that of miR33 (shHD-33full-mimic) (Table 3). All designs were created to generate a bulge or kink in the shRNA hairpin structure and the guide strand is processed from the 5′ hairpin arm rather than the 3′ arm. The shHD-33part and shHD-33part-3′k designs were partial miR33 scaffolds, lacking full miR33 5′ leader and 3′ trailer flanking sequences. Both designs exhibited very poor abundance and low guide strand processing predictability (Table 2). In contrast, shHD-33full and shHD-33full-mimic processed to high accuracy (85-90%) at the 5′ end of the guide strand and reached relatively high abundance (Table 2). These designs mimicked the miR33 miRNA structure, with shHD33-full-mimic creating a central bulge quite similar to miR33 (FIG. 2C). Thus, the miR33 scaffold designs provided robust processing by generating predictable 5′ end processing products, accurate placement of central mismatches, and relatively high abundance of mature guide strands.

TABLE 3
CAG Repeat-Targeted shRNA miR33 Scaffold Cloning Inserts.

| shRNA name | shRNA cloning insert sequence (5′-3′) | Scaffold |
|---|---|---|
| shHD-33part | GTGGAAAGGACGAAACA g ctg | miR33 pTRC Pol III |
| | CTGCTGCTAAAGCTGCTGCTG t | |
| | gttctggcaatacct g ca | |
| | GCAGCAGCCAAAGCAGCAGCA ga tttttg | |
| | AATTCTCGACCTGGTGACAA [SEQ ID NO: 63] | |
| shHD-33part-3′k | GTGGAAAGGACGAAACA g ctg | miR33 pTRC Pol III |
| | CTGCTGCTAAAGCTGCTGCTG t | |
| | gttctggcaatacct g ca | |
| | GCAGCAGCTTAGCAGCAGCA ga tttttg | |
| | AATTCTCGACCTGGTGACAA [SEQ ID NO: 64] | |
| shHD-33full | GTGGAAAGGACGAAACA | miR33 pTRC Pol III |
| | tgcacacctcctggcgggcagct ctg | |
| | CTGCTGCTAAAGCTGCTGCTG t | |
| | gttctggcaatacct g ca | |
| | GCAGCAGCCAAAGCAGCAGCAG gg | |
| | aggcctgccctgactgcccac tttttg | |
| | AATTCTCGACCTGGTGACAA [SEQ ID NO: 65] | |
| shHD-33full- | GTGGAAAGGACGAAACA | miR33 pTRC Pol III |
| mimic | tgcacacctcctggcgggcagct ctg | |
| | CTGCTGCTAAAGCTGCTGCTG t | |
| | gttctggcaatacct g ca | |
| | GCAGCACATCTAGCAGCAGCAG gg | |
| | aggcctgccctgactgcccac tttttg | |
| | AATTCTCGACCTGGTGACAA [SEQ ID NO: 66] | |

Bold uppercase sequence matches target cloning vector for recombination-based cloning. Italic sequence represents expected mature guide and passenger strands of mature duplex RNA. Underlined sequence represents mismatched sequence compared to potential targets or deviations from repeat sequence. Lowercase sequence represents internal loop of shRNA hairpin. Only the sense strand of a duplex DNA insert is shown.

### Example 2: Selective Reduction of CAG Repeat Expansion Gene Expression with CAG Repeat-Targeted shRNAs in a Luciferase-Based Model System

[0419] To evaluate the efficiency and allele selectivity of CAG repeat-targeted shRNAs, a luciferase-based reporter assay was utilized in HEK 293T cells. Fragments of HTT exon 1 from wt (containing 17 CAG repeats) or mut (containing 68 CAG repeats) mRNA were cloned in-frame and upstream of firefly luciferase. HEK293Ts were co-transfected with wt or mut luciferase reporter plasmids with control or CAG repeat targeted shRNA (FIG. 3A). Luciferase activity for each shRNA was set relative to control scramble shRNA. The positive control shMchry and shHD1 shRNAs displayed 50-60% reduction of luciferase activity for both wt (CAG17) and mut (CAG68). No significant reduction in luciferase activity was observed for HD1L-1, HD1L-1a, HD1L-1b, HD1L-d, or HD-33part-3′k when comparing wt to mut. Significant decreases in mut activity relative to wt were observed for HD1L-1c, HD-33part, HD-33full and HD-33full-mimic.

### Example 3: Knockdown of Huntingtin Gene Expression with CAG Repeat-Targeted shRNAs

[0420] Small interfering RNAs (siRNAs) targeting CAG repeats and possessing central mismatches have previously been demonstrated to selectively knockdown the endogenous mutant HTT allele (Hu et al., 2009). To confirm that our system was responding similarly to siRNAs, four control siRNAs in patient-derived fibroblasts (GM04281) were transfected (Table 4). Control siRNAs targeting outside of the repeat (siHD2.4) and targeting the CAG repeat directly with perfect pairing (siHD-3) both knocked-down protein expression similarly when assayed by Western blot (FIG. 3B). As expected, these siRNAs did not exhibit strong allele selective inhibition, especially siHD2.4. Conversely, both siHD-3-p9 and siHD-3-p9-11, which introduce central mismatches to the target at positions 9 and 9-11, respectively, provided a window of allele selective knockdown. When HTT expression was assayed by Western blot, each produced a greater reduction in the mutant HTT versus the wt HTT allele over a certain concentration range (FIG. 3B). These results correlate with previous reports using siRNAs (Hu et al., 2009).

TABLE 4
Synthetic CAG Repeat-Targeted siRNAs.

| siRNA name | siRNA sequence (5′-3′) |
|---|---|
| siHD2.4_as | rUrArGrArCrArArUrGrArUrUrCrArCrArCrGrGtt (SEQ ID NO: 67) |
| siHD-3_as | rGrCrUrGrCrUrGrCrUrGrCrUrGrCrUrGrCrUrGtt (SEQ ID NO: 68) |
| siHD-3-p9_as | rGrCrUrGrCrUrGrCrArGrCrUrGrCrUrGrCrUrGtt (SEQ ID NO: 69) |
| siHD-3-p9-11_as | rGrCrUrGrCrUrGrCrArArArUrGrCrUrGrCrUrGtt (SEQ ID NO: 70) |
| siHD2.4_s | rCrCrGrUrGrUrGrArArUrCrArUrUrGrUrCrUrAtt (SEQ ID NO: 71) |
| siHD-3_s | rCrArGrCrArGrCrArGrCrArGrCrArGrCrArGrCtt (SEQ ID NO: 72) |
| siHD-3-p9_s | rCrArGrCrArGrCrArGrCrUrGrCrArGrCrArGrCtt (SEQ ID NO: 73) |
| siHD-3-p9-11_s | rCrArGrCrArGrCrArUrUrUrGrCrArGrCrArGrCtt (SEQ ID NO: 74) |

″rN″ indicates an RNA nucleotide

[0421] To determine whether CAG repeat-targeted shRNAs could produce allele-selective inhibition of endogenous mut HTT, shRNAs expressed from a miR33 scaffold including shScramble, shHD2.4, shHD-33full and shHD-33full-mimic were packaged into lentiviral particles and transduced patient-derived fibroblasts. Cells were stably infected at greater than 90% efficiency based on microscopy for GFP. After 7 days, cells were harvested and HTT expression assayed by Western blot. Compared to shScramble transduced patient-derived fibroblasts, both wt and mut HTT were significantly decreased by HD2.4. Compared to shScramble transduced patient-derived fibroblasts, allele-selective shRNAs significantly decreased expression of mut-HTT in cells transduced with shHD-33full and shHD33-fullmimic (FIG. 5).

[0422] shRNA expression cassettes were electroporated into GM04281 fibroblasts. After 3.5 days, cells were assayed for HTT expression by Western blot. By Western blot analysis, we found that several shRNAs, including shHD1-1, shHD1L-1, and shHD1L-1a through -1d, were not producing a substantial reduction of HTT expression. Microscopy and flow cytometry measuring EGFP expression typically revealed 30-40% efficiency using this transfection protocol. Further testing of shRNAs expressed from miR33 scaffolds, which processed well based on small RNA sequencing, also did not provide robust knockdown. These, results suggested that shRNA expression may not be achieving high levels in patient-derived fibroblasts.

### Example 4: shRNA Abundance of Mismatched Vs. Perfect Matched Guide Sequences

[0423] % abundance of a correctly processed artificial miRNA may be measured by obtaining the number of RNA sequence reads of artificial miRNAs that have the correctly processed 5′ end and align to the reference CAG repeat region containing reference transcript, and dividing by the total number of RNA sequence reads of artificial miRNAs aligned to the reference CAG repeat region containing reference transcript

[0424] As shown in Table 5 and FIG. 4, the presence of mismatch(es) at positions 8-16 of the guide sequence targeting CAG repeat region of HTT mRNA improves the abundance or virally encoded shRNA compared to perfectly matched guide sequences. The results are consistent across different hairpin loops and cell types.

TABLE 5
Abundance of Mismatched vs. Perfect Matched shRNAs

| | | | | # of | | | | Most | |
|---|---|---|---|---|---|---|---|---|---|
| | Cell | | | align- | | | | abundant | |
| Construct | type | Type | Strand | ments | Loop | Sequence | Round | read | % |
| shHD_1_ | HD | Perfect | A | 434 | ctc | CAGCAGCAGC | 2 | AGCAGCAGCA | 12% |
| A | fibro | | | | gag | AGCAGCAGCA | | GCAGCAGCAG | |
| | blast | | | | | G (SEQ ID | | (SEQ ID | |
| | | | | | | NO: 746) | | NO: 747) | |
| shHD_1_ | HD | Perfect | B | 627 | ctc | CTGCTGCTGC | 2 | CTGCTGCTGC | 11% |
| B | fibro | | | | gag | TGCTGCTGCT | | TGCTGCTGtt | |
| | blast | | | | | G (SEQ ID | | t (SEQ ID | |
| | | | | | | NO: 748) | | NO: 749) | |
| shHD_ | HD | Mismatch | A | 193 | ctc | CAGCAGCAGt | 2 | gCAGCAGCAG | 32% |
| 1L_A | fibro | | | | gag | ttCAGCAGCA | | tttCAGCAG | |
| | blast | | | | | G (SEQ ID | | (SEQ ID | |
| | | | | | | NO: 501) | | NO: 750) | |
| shHD_ | HD | Mismatch | B | 13517 | ctc | CTGCTGCTGa | 2 | CTGCTGaaaC | 44% |
| 1L_B | fibro | | | | gag | aaCTGCTGCT | | TGCTGCTGtt | |
| | blast | | | | | G (SEQ ID | | ttt (SEQ | |
| | | | | | | NO: 420) | | ID NO: 751) | |
| shHD1_1_ | HEK293T | Perfect | A | 4658 | acc | GCAGCAGCAG | 3 | CAGCAGCAGC | 32% |
| A | | | | | tgc | CAGCAGCAGC | | AGCAGCAGCA | |
| | | | | | | AGC (SEQ | | GC (SEQ ID | |
| | | | | | | ID NO: 752) | | NO: 753) | |
| shHD1_1_ | HEK293T | Perfect | B | 7543 | acc | GCTGCTGCTG | 3 | CTGCTGCTGC | 20% |
| B | | | | | tgc | CTGCTGCTGC | | TGCTGCTGCt | |
| | | | | | | TGC (SEQ | | (SEQ ID | |
| | | | | | | ID NO: 754) | | NO: 755) | |
| shHD1L_ | HEK293T | Mismatch | A | 5434 | acc | GCAGCAGCTC | 3 | cGCAGCAGCT | 67% |
| 1_A | | | | | tgc | TAGCAGCAGC | | CTAGCAGCAG | |
| | | | | | | AGC (SEQ | | (SEQ ID | |
| | | | | | | ID NO: 756) | | NO: 757) | |
| shHD1L_ | HEK293T | Mismatch | B | 178998 | acc | GCTGCTGCTG | 3 | CTGCTGCTAG | 71% |
| 1_B | | | | | tgc | CTAGAGCTGC | | AGCTGCTGCt | |
| | | | | | | TGC (SEQ | | tt (SEQ ID | |
| | | | | | | ID NO: 758) | | NO: 759) | |

### Example 5: In Vivo Knockdown

[0425] The expression construct U6-shHD33-Full-Mimic was cloned into an AAV9 vector backbone, and AAV9 was produced using triple transfection into mammalian cells and purified by double CsCl density gradient ultra-centrifugation, desalting, and filter sterilization (Signagen Laboratories). AAV vectors were titered via quantitative polymerase chain reaction (qPCR). As a negative control, Scrambled shRNA was also packaged into AAV9 (AAV9-shScr) using the same manufacturing process. All of the expression cassettes contained green fluorescent protein (GFP)-encoding sequences in order to assess transduction efficiency.

[0426] The vector preparation was administered via bilateral striatal injection into anesthetized male zQ175 HET mice (B6J.129S1-Htt^{tm1Mfe}/190ChdiJ) using stereotaxic injection at 4 weeks of age. zQ175 mice express the human HTT exon 1 sequence with a ˜190 CAG repeat tract in one allele and a normal mouse HTT in the other allele. Menalled et al. (2012) PLoS ONE 7:e49838. A 2.0 uL volume of test article was pump delivered at a rate of 0.1 uL/minute. Mice received AAV9-shScr (8.0E9 vg/mouse) or AAV9-shHD33-Full-Mimic (8.0E9 vg/mouse).

[0427] Six weeks after injections, brain tissue was harvested, and GFP distribution was analyzed by histology. Co-localization of DARPP32 and GFP staining demonstrated transduction of zQ175 striatum (FIG. 6). Western blot analysis of wild-type (WT) and mut HTT protein expression showed significant knockdown of mut HTT in the AAV9-shHD33-Full-Mimic treatment group relative to the AAV9-shScr treatment group (FIG. 7). Furthermore, AAV9-shHD33-Full-Mimic showed preferential knockdown of the mut HTT allele relative to the WT HTT allele.

### Example 6: Allele-Selective Knockdown in zQ175 Mouse Model of Huntington's Disease

### Materials & Methods

[0428] The expression construct U6-shHD33-Full-Mimic (Iris sbRNA) was cloned into an AAV9 vector backbone, and AAV9 was produced using triple transfection into mammalian cells and purified by double CsCl density gradient ultra-centrifugation, desalting, and filter sterilization (Signagen Laboratories). Virus was formulated in PBS plus 0.005% Pluronic F-68. The expression cassettes contained GFP in order to assess transduction efficiency. AAV vectors were titered via qPCR. As a negative control, formulation vehicle was delivered to one group of transgenic mice and one group of wild-type littermates.

[0429] The vector preparation was administered via bilateral striatal injection into anesthetized male zQ175 transgenic mice (B6J.129S1-Htt^{tm1Mfc}/190ChdiJ) and wild-type littermates using stereotaxic injection at 4 weeks of age. A 2.0 μL volume of test article was pump delivered at a rate of 0.1 μL/minute. Mice received test article as outlined in Table 9.

TABLE 9

| | | | | Dose |
|---|---|---|---|---|
| Group | Number | Genotype | Test Article | vg/mouse |
| 1 | 5 | wild-type (littermate) | vehicle | n/a |
| 2 | 5 | zQ175 transgenic | vehicle | n/a |
| 3 | 5 | zQ175 transgenic | Scramble | 8e9 |
| | | | shRNA (control) | |
| 4 | 5 | zQ175 transgenic | Iris sbRNA | 8e8 |
| 5 | 5 | zQ175 transgenic | Iris sbRNA | 4e9 |
| 6 | 5 | zQ175 transgenic | Iris sbRNA | 8e9 |

[0430] “Iris sbRNA” refers to a recombinant AAV comprising SEQ ID NO:606, a nucleotide sequence that encodes an sbRNA that, when processed within a cell, produces a double-stranded RNA comprising a first strand that is SEQ ID NO:325 and a second strand that is SEQ ID NO:555 (CUG_307 of Table 6). Iris sbRNA is also referred herein to as “shHD33 full mimic.”

[0431] Body weights of animals were taken at baseline in order to ensure even distribution between treatment groups. Weights were then assessed once per week until the time of tissue collection when animals were weighed before being collected.

[0432] Six weeks after injections, brain tissue was harvested. One animal per group (6 animals in total) were anesthetized with isoflurane and transcardially perfused with PBS until the liver was clear followed by approximately 50 mL of 4% PFA. The whole brain was harvested and placed into 25 mL vials with 4% PFA and stored at 4° C. for 24 hours. After 24 hours, brains were transferred to 30% sucrose in PBS and stored at 4° C. For the remaining 4 animals in each group (24 animals in total), the animals were euthanized via rapid decapitation, and the brain was excised from the skull and rinsed in chilled 0.9% sterile saline to remove excess blood. Brains were microdissected by region under RNase-free conditions on top of a pre-wetted (0.9% saline) piece of clean (free of DNA and RNA) filter paper resting on a glass petri dish packed in wet ice. The following structures were dissected: striatum, cortex, and cerebellum. Each tissue sample was placed into individual 1.5 mL Eppendorf tubes and snap frozen in liquid nitrogen.

[0433] Striatal tissue samples were homogenized in lysis buffer from the miRvana miRNA isolation kit (Invitrogen). DNA was extracted using the All Prep DNA/RNA kit (Qiagen), and separate small RNA and total RNA fractions were extracted using the miRvana miRNA isolation kit. qPCR was performed by loading 100 ng DNA per reaction with TaqMan Universal PCR Master Mix II (Applied Biosystems) and using primer/probe sets targeting GFP (forward: GGAGCGCACCATCTTCTT (SEQ ID NO:860), reverse: ATGTTGCCGTCCTCCTTG (SEQ ID NO:861), probe: AAGGACGACGGCAACTACAAGACC (SEQ ID NO:862)) and mouse GAPDH (forward: TCACCTGGCCTACAGGATAAA (SEQ ID NO:863), reverse: GCAAACGGGAAGGAAATGAATG (SEQ ID NO:864), probe: ACCCAGCCGAGAGGAATGAGGTTA (SEQ ID NO:865)). Reactions were run on the Quantstudio 7 Pro (Applied Biosystems).

[0434] Whole brains were mounted onto a sliding microtome and frozen with dry ice. Coronal sections (30 m) were cut, with every 8^{th} section collected for immunofluorescent staining. Brains were stained as floating sections in a 12-well dish. Tissue sections were washed twice for 5 minutes each in PBS, then blocked in a solution containing 5% donkey serum and 0.3% Triton X-100 in PBS for 2 hours at room temperature. After blocking, tissue sections were incubated with rabbit monoclonal anti-DARPP32 (1:100, Abcam, ab40801) primary antibodies overnight at 4° C. Tissue sections were washed again three times for 15 minutes each in 0.3% Triton X-100 in PBS. Tissue sections were incubated with Alexa Fluor 594 goat anti-rabbit secondary antibody (1:500, Life Technologies, A11012) for 2 hours at room temperature. Tissue sections were washed again three times for 15 minutes each in 0.3% Triton X-100 in PBS, followed by 4′,6-diamidino-2-phenylindole (DAPI) nuclear stain (Abcam) for 20 minutes at room temperature. Tissue sections were washed twice in PBS, then mounted onto slides and coverslipped. Images of the sections were taken using an Axioscan Z (Zeiss) microscope.

[0435] Striatal tissue samples were homogenized in lysis buffer (150 mM NaCl, 50 mM Tris pH 7.5, 1 mM EDTA, 1% Triton X-100, and 1% protease inhibitor). Total protein was quantified using the Micro BCA Protein Assay kit (ThermoFisher). 35 μg/well of protein was loaded into 5.5% Tris-acetate polyacrylamide gels for Western blot analysis. Gels were run in Tris-Acetate running buffer at 70 V for 15 minutes then at 120 V for 3 hours. After electrophoresis, proteins were transferred to an NC membrane (Bio-Rad). The membrane was blocked in 5% milk in PBST and TBST separately for 1 hour at room temperature. The membrane was incubated with primary antibodies specific for mouse monoclonal anti-HTT (1:1,000, Sigma Aldrich, MAB2166) and rabbit monoclonal anti-vinculin (1:10,000, Abcam, ab129002) overnight at 4° C. The membrane was washed three times for 5 minutes each in PBST/TBST, then incubated with corresponding AffiniPure Peroxidase-conjugated secondary antibodies: donkey anti-mouse IgG (H+L) (1:4000, Jackson ImmunoResearch Laboratories, 715-035-150), donkey anti-rabbit IgG (H+L) (1:5000, Jackson ImmunoResearch Laboratories, 711-035-152) for 1.5 hours at room temperature. The membrane was washed three more times for 10 minutes each in PBST/TBST. The membrane was then incubated with SuperSignal West Pico Chemiluminescent Substrate (Thermo Scientific) for 3 minutes at room temperature. Images were acquired on the iBright 1500 (Invitrogen), and band intensity was quantified using ImageJ.

### Results

[0436] All animals had surgery performed at 4 weeks of age and survived until tissue collection at 10 weeks of age, 6 weeks post dose administration. No abnormalities were noted throughout the study and no premature deaths were reported. zQ175 transgenic animals treated with either Scramble shRNA control at 8e9 vg or Iris sbRNA at 8e9 vg weighed significantly less than zQ175 transgenic animals treated with vehicle starting at 8 weeks of age and continuing through the rest of the study.

[0437] Viral genomes were quantified by qPCR and demonstrated dose-dependent sbRNA genome localization to the striatum (FIG. 8, right panel). GFP distribution was analyzed by immunofluorescence. Co-localization of DARPP32 and GFP staining demonstrated dose-dependent transduction of the zQ175 striatum (FIG. 8, left panel. Western blot analysis of WT and mut HTT protein expression showed significant knockdown of mut HTT in the Iris sbRNA treatment group relative to the vehicle group at doses of 8e8 vg and 4e9 vg (FIG. 9). Furthermore, Iris sbRNA showed preferential knockdown of the mut HTT allele relative to the WT HTT allele.

### Example 7: Allele-Selective Knockdown in ATXN2 Mouse Model of SCA2

### Materials & Methods

[0438] The expression construct U6-shHD33-Full-Mimic was cloned into an AAV9 vector backbone, and AAV9 was produced using triple transfection into mammalian cells and purified by double CsCl density gradient ultra-centrifugation, desalting, and filter sterilization (Signagen Laboratories). Virus was formulated in PBS plus 0.005% Pluronic F-68. The expression cassettes contained GFP in order to assess transduction efficiency. AAV vectors were titered via qPCR. As a negative control, formulation vehicle was delivered to one group of transgenic mice and one group of wild-type littermates.

[0439] The vector preparation was administered via unilateral (right hemisphere) intracerebral ventricular injection into anesthetized male ATXN2-Q127 transgenic mice (C57BL6/J×DBA/2J hybrid background) and wild-type littermates using stereotaxic injection at 8 weeks of age. ATXN2-Q127 mice contain the complete human ataxin-2 cDNA encoding 127 glutamine repeats (Q127) under the control of the Pcp2 (Purkinje cell-specific) promoter (Hansen et al. (2013) Hum Mol Genet. 22:271). A 10.0 μL volume of test article was pump delivered at a rate of 1 μL/minute. Mice received test article as outlined in Table 10.

TABLE 10

| | | | | Dose |
|---|---|---|---|---|
| Group | Number | Genotype | Test Article | vg/mouse |
| 1 | 5 | wild-type (littermate) | vehicle | n/a |
| 2 | 5 | ATXN2-Q127 transgenic | vehicle | n/a |
| 3 | 5 | ATXN2-Q127 transgenic | Scramble shRNA | 2e11 |
| | | | (control) | |
| 4 | 5 | ATXN2-Q127 transgenic | Iris sbRNA | 5e10 |
| 5 | 5 | ATXN2-Q127 transgenic | Iris sbRNA | 2e11 |

[0440] Body weights of animals were taken at baseline in order to ensure even distribution between treatment groups. Weights were then assessed once per week until the time of tissue collection when animals were weighed before being collected.

[0441] Six weeks after injections, brain tissue was harvested. One animal per group (6 animals in total) were anesthetized with isoflurane and transcardially perfused with PBS until the liver was clear followed by approximately 50 mL of 4% PFA. The whole brain was harvested and placed into 25 mL vials with 4% PFA and stored at 4° C. for 24 hours. After 24 hours, brains were transferred to 30% sucrose in PBS and stored at 4° C. For the remaining 4 animals (or 3 animals for the wild-type group) in each group (19 animals in total), the animals were euthanized via rapid decapitation, and the brain was excised from the skull and rinsed in chilled 0.9% sterile saline to remove excess blood. Brains were microdissected by region under RNase-free conditions on top of a pre-wetted (0.9% saline) piece of clean (free of DNA and RNA) filter paper resting on a glass petri dish packed in wet ice. The following structures were dissected: striatum, cortex, and cerebellum. Each tissue sample was placed into individual 1.5 mL Eppendorf tubes and snap frozen in liquid nitrogen.

[0442] Cerebellum tissue samples were homogenized in lysis buffer from the miRvana miRNA isolation kit (Invitrogen). DNA was extracted using the All Prep DNA/RNA kit (Qiagen), and separate small RNA and total RNA fractions were extracted using the miRvana miRNA isolation kit. qPCR was performed by loading 400 ng DNA per reaction with TaqMan Universal PCR Master Mix II (Applied Biosystems) and using primer/probe sets targeting GFP (forward: GGAGCGCACCATCTTCTT (SEQ ID NO:860), reverse: ATGTTGCCGTCCTCCTTG (SEQ ID NO:861), probe: AAGGACGACGGCAACTACAAGACC (SEQ ID NO:862)) and mouse GAPDH (forward: TCACCTGGCCTACAGGATAAA (SEQ ID NO:863), reverse: GCAAACGGGAAGGAAATGAATG (SEQ ID NO:864), probe: ACCCAGCCGAGAGGAATGAGGTTA (SEQ ID NO:865)). Reactions were run on the Quantstudio 7 Pro (Applied Biosystems).

[0443] Whole brains were mounted onto a sliding microtome and frozen with dry ice. Sagittal sections (60 m) were cut, with every 8* section collected for immunofluorescent staining. Brains were stained as floating sections in a 12-well dish. Tissue sections were washed three times for 5 minutes each in PBS, then blocked in a solution containing 5% donkey serum and 0.3% Triton X-100 for 2 hours at room temperature. After blocking, tissue sections were incubated with mouse monoclonal anti-calbindin (1:100, Sigma Aldrich, SAB4200543) primary antibodies overnight at 4° C. Tissue sections were washed again three times for 15 minutes each in 0.3% Triton X-100 in PBS. Tissue sections were incubated with Alexa Fluor 594 goat anti-mouse secondary antibody (1:500, Life Technologies, A11005) for 2 hours at room temperature. Tissue sections were washed again three times for 15 minutes each in 0.3% Triton X-100 in PBS, followed by 4′,6-diamidino-2-phenylindole (DAPI) nuclear stain (Abcam) for 20 minutes at room temperature. Tissue sections were washed twice in PBS, then mounted onto slides and coverslipped. Images of the sections were taken using an Axioscan Z (Zeiss) microscope.

[0444] Cerebellum tissue samples were homogenized in extraction buffer (25 mM Tris-HCl pH 7.6, 300 mM NaCl, 0.5% Nonidet P-40, 2 mM EDTA, 2 mM MgCl₂, 0.5 M urea and protease inhibitors). Homogenized tissue was centrifuged, and the supernatant was collected. Equal volumes of protein were loaded into sodium dodecyl-sulfate polyacrylamide gels for Western blot analysis. Gels were run in running buffer (25 mM Tris, 192 mM Glycine, 0.1% SDS, pH 8.3) at 40 mA and maximum voltage for 2 hours. After electrophoresis, proteins were transferred to a Hybond PVDF membrane (Amersham Bioscience) in transfer buffer (25 mM Tris, 192 mM glycine, 20% (v/v) methanol, pH 8.3) at 20 V and maximum amperage for 1.5 hours using a semidry transfer system (Bio-Rad). The membrane was blocked in 4% skim milk in 0.1% Tween 20/PBS for 2 hours at 4° C. The membrane was incubated with the following primary antibodies: mouse anti-Ataxin-2 antibody (1:4,000, BD Biosciences, 611378), mouse monoclonal anti-GFP antibody (1:2,000, Santa Cruz, sc-9996), mouse monoclonal Anti-Calbindin-D-28K antibody (1:7,000, Sigma-Aldrich, C9848), rabbit polyclonal anti-RGS8 antibody (1:5,000, Novus Biologicals, NBP2-20153), mouse monoclonal anti-PCP-2 antibody (1:2,000, Santa Cruz, sc-137064), rabbit monoclonal anti-GAPDH (1:5,000, Cell Signaling Technology, 2118), mouse monoclonal anti-o-Actin-peroxidase antibody (1:30,000, Sigma-Aldrich, A3854), rabbit polyclonal anti-Ataxin-1 Antibody (1:4,000, Cell Signaling Technology, 2177), rabbit polyclonal anti-AAK1 Antibody (1:4,000, Cell Signaling Technology, 79832), rabbit monoclonal anti-Brn2/POU3F2 (1:4,000, Cell Signaling Technology, 12137), rabbit polyclonal anti-TBP Antibody (1:5,000, Cell Signaling Technology, 8515), rabbit polyclonal anti-AF9 Polyclonal antibody (1:4,000), Proteintech, 12825-1-AP) overnight at 4° C. The membrane was washed three times for 10 minutes each in 0.1% Tween 20/PBS, then incubated with corresponding Peroxidase-conjugated secondary antibodies: goat anti-rabbit IgG (H+L) antibody (1:5000, Jackson ImmunoResearch Laboratories, 111-035-144), donkey anti-mouse IgG (H+L) (1:5000, Jackson ImmunoResearch Laboratories, 715-035-150), and horse anti-mouse IgG (H+L) antibody (1:5,000, Vector laboratories, PI-2000) in 4% skim milk in 0.1% Tween 20/PBS for 2 hours at 4° C. The membrane was washed three more times for 10 minutes each in 0.1% Tween 20/PBS. The membrane was then incubated with Immobilon Western Chemiluminescent HRP Substrate (EMD Millipore) according to the manufacturer's protocol. Images were acquired on the ChemiDoc MP imager (Bio-Rad), and band intensity was quantified using ImageJ.

### Results

[0445] All animals had surgery performed at 8 weeks of age and survived until tissue collection at 14 weeks of age (6 weeks post dose administration), with the exception of one wild-type animal treated with vehicle that was found dead on the day of tissue collection at 14 weeks of age. Viral genomes were quantified by qPCR and demonstrated detectable sbRNA genome localization to the cerebellum (FIG. 10, right panel). GFP distribution was analyzed by immunofluorescence. Co-localization of calbindin and GFP staining demonstrated dose-dependent transduction of the ATXN2-Q127 cerebellum (FIG. 10, left panel). Western blot analysis of WT and mut ATXN2 protein expression showed significant knockdown of mut ATXN2 in the Iris sbRNA treatment group relative to the vehicle group at a dose of 5e10 vg (FIG. 11, left panel). In addition, Iris sbRNA showed preferential knockdown of the mut ATXN2 allele relative to the WT ATXN2 allele. Treatment with Iris sbRNA resulted in partial restoration of the expression of key cerebellar genes Calb1, Rgs8, and Pcp2, molecular demonstration of downstream improvement as a result of mut ATXN2 knock-down (FIG. 11, right panel). Furthermore, Western blot (WB) analysis of the expression of other genes containing endogenous CAG repeats (ATXN1, AF-9, AAK-1, TBP, and Brn2) demonstrated that sbRNAs targeting the expanded CAG repeat in the ATXN2 gene do not affect translation of healthy transcripts containing the same repeat (FIG. 12).

### Example 8: Register does not Impact Knock-Down Efficiency for Cag Repeats

[0446] Lentivirus shRNA expression plasmids and lentiviral particles were produced as described in the Materials and Methods section above. HD fibroblasts were infected with lentiviral particles that express the indicated shRNA/miRNA sequences. WB were performed 5 days after infection using anti-HTT and anti-Vinculin, as described in the Materials and Methods section above. Knock-down of mHTT was observed for all sequences evaluated (FIG. 13A-13C). These data demonstrate that 1) different combinations of mismatches between the first and second strand of the double stranded RNA (e.g. 3 mismatches in the “Iris sbRNA” and 0 mismatches in the “Iris sbRNA-nb” lentivirus samples) and 2) different mismatches within the first strand of the double stranded RNA (e.g. TAC mismatches in the “Iris-sbRNA-UAC” and AAA mismatches in the “Iris sbRNA” lentivirus samples) are capable of efficient knock-down of mHTT and allele-selectivity.

[0447] FIG. 13A-13C. FIG. 13A. Design of additional guide strand, loop, and passenger strand sequences. 30lp: miR-30 loop; 30lp2: variant of the miR-30 loop; cb: 3 mismatches between the first and second strand of double stranded RNA; nb: no bulge (no mismatches between first and second strand of double stranded RNA); frm2: frame 2 (register 2) with 2 mismatches in the 3′ end of the loop; UAC: central mismatches are TAC (rather than AAA). FIG. 13B. HD patient-derived fibroblasts were transduced with lentivirus encoding the miRNA variants described in 2D. FIG. 13C. Quantification of the western blot data in FIG. 13D.

[0448] Lentivirus shRNA expression plasmids and lentiviral particles were produced as described in the Materials and Methods section above. These particles included samples which allowed for comparison of the same miRNA scaffold containing first strand sequences representative of the 1st registry (denoted HD33FM), 2nd registry (denoted “TGC”), or 3rd registry (denoted “GCT”). HD patient-derived fibroblasts were transduced with the indicated sbRNA-expressing lentiviral particles at 10 MOI. HTT expression levels were evaluated by Western blot 7 days after transduction and normalized to Scramble33Full wtHTT or mHTT. Prior to collection, GFP fluorescence was assessed to confirm infection. The level of mHTT knock-down and the level of wtHTT expression were similar between the HD33FM, TGC, and GCT lentivirus samples (FIG. 13D and FIG. 13E). These data demonstrate that sequences initiated at any of the three possible nucleotides within the repeat (e.g. the first strand sequence starting with C (1st registry), U (2nd registry), or G (3rd registry) are capable of efficient knock-down of mHTT and allele-selectivity.

### Example 9: Allele-Selective Reduction of CAG Repeat Expansion Protein Expression with CAG Repeat-Targeted miRNAs in a Luciferase-Based Model System

[0449] Guide sequence candidates were generated to systematically evaluate the effect of the number and position of mismatches, as well the starting position of the guide within the repeat (i.e. C, U, or G). Guide sequences containing a single mismatch in positions 8, 9, 10, and 11 were generated. Guide sequences containing double mismatches, where at least one mismatch is located in position 8, 9, 10, or 11, and the second mismatch is located within positions 8-16, were generated. Triple and quadruple mismatches, where at least two mismatches are located in position 8, 9, 10, or 11, and the remaining mismatches are located within positions 8-16, were also included.

[0450] To evaluate the starting position of the guide, sequences were generated containing three mismatches, where at least two mismatches are located in position 8, 9, 10, or 11, and the remaining mismatches are located within positions 8-16. These sequences initiated at any of the three possible nucleotides within the repeat (i.e. C, U, or G).

[0451] In silico analyses were conducted to remove guide sequences that have the potential for deleterious off-target effects. Sequences were synthesized if the following criteria for off-target genes were met:
[0452] off-target genes containing fully complementary sequence to guide sequence positions 1-21
[0453] ≤2 off-target genes containing fully complementary 17mer within guide sequence positions 1-21
[0454] If off-target gene(s) contain fully complementary 17mer:
   [0455] Off-target gene(s) cannot be tumor suppressor gene(s)
   [0456] Off-target gene(s) cannot have high expression in caudate or putamen relative to whole brain or relative to all other tissues
   [0457] If fully complementary 17mer contains fully complementary seed sequence (guide sequence positions 2-8):
      [0458] Off-target gene(s) cannot be highly expressed in caudate or putamen relative to other genes

[0459] 124 guide sequence candidates that passed the in silico analysis were embedded within the mir-33 scaffold (SEQ ID NO:X), synthesized, and cloned into a custom mammalian expression plasmid that contains a U6 promoter driving the miRNA and a human PGK promoter driving GFP-T2A-Puromycin.

[0460] To evaluate the efficiency and allele selectivity of CAG repeat-targeted miRNAs, fragments of HTT exon 1 from wild-type (containing 17 CAG repeats) or mutant (containing 68 CAG repeats) mRNA were cloned in-frame and upstream of firefly luciferase (FIG. 14). Luciferase assays were established and performed by co-transfecting HEK293T cells on 96-well plates (40,000 cells/well) with 6.0 ng of wild-type (wt) or mutant (mut) HTT luciferase plasmid, 0.9 ng CMV-Renilla plasmid (Promega), and 0.75 ng indicated miRNA-expressing plasmid using calcium phosphate transfection method. Forty-eight hours after transfection, cells were lysed in 25 μL of 1× Passive Lysis buffer (Promega) for 40 min, and dual luciferase reporter assays (Hampf and Gossen (2006) Anal. Biochem. 356:94-99) were performed using 10 μL of lysate to determine the knockdown efficiency of the designed miRNAs. Firefly luciferase values were first normalized to Renilla luciferase values and then normalized to scramble miRNA controls. Luciferase experiments were performed at least 3 times and statistical analysis was performed using multiple t-tests comparing wt vs mut normalized luciferase activity for each miRNA. The positive control miRNA HD1-1 construct (targeting the CAG repeat with no mismatches) resulted in ˜70% decrease in luciferase activity for both wt and mut HTT constructs. Reduction in mut HTT expression >50% was observed for 27 of the 124 guide sequences evaluated. A relative preservation of wt HTT expression (<20% knock-down) was observed for 55 of the 124 guide sequences evaluated (FIG. 16). Allele-selectivity for mut HTT (defined as a ratio of wt HTT/mut HTT expression>1.4) was observed for 26 of the 124 guide sequences evaluated. Significant decreases (p<0.05) in mut HTT activity relative to wt HTT were observed for 19 of the 124 tested miRNAs.

[0461] For guide sequences containing a single mismatch, mismatches located in position 8 or 9 showed improved knock-down of mut HTT and allele-selectivity toward mut HTT compared to mismatches located in position 10 or 11 (FIG. 18). There were no strong trends observed related to starting mismatch position or distance between mismatches for guide sequences containing three or four mismatches (FIG. 20). Similarly, there were no strong trends observed related to the starting position of the guide within the repeat (i.e. C, U, or G) for guide sequences containing three mismatches (FIG. 21).

[0462] Overall, guide sequences containing two mismatches showed the best combination of knock-down of mut HTT and allele-selectivity toward mut HTT (FIG. 17). Of the guide sequences containing two mismatches, knock-down of mut HTT and allele-selectivity toward mut HTT were demonstrated for all sequences with initial mismatches in position 8, 9, 10, or 11. The level of knock-down of mut HTT and allele-selectivity toward mut HTT increased as the distance between mismatches increased (FIG. 19).

[0463] Nine guide sequences were identified as the top candidates, based on the following criteria: 1) significant decreases (p<0.05) in mut HTT activity relative to wt HTT, 2) allele-selectivity for mut HTT (defined as a ratio of wt HTT/mut HTT expression >1.4), 3) reduction in mut HTT expression >50%, and 4) relative preservation of wt HTT expression (<20% knock-down). The mut HTT and wt HTT expression levels following transfection with these 9 guide sequences is shown in (FIG. 15).

[0464] The various embodiments described above can be combined to provide further embodiments. All of the U.S. patents, U.S. patent application publications, U.S. patent applications, foreign patents, foreign patent applications and non-patent publications referred to in this specification and/or listed in the Application Data Sheet are incorporated herein by reference, in their entirety. Aspects of the embodiments can be modified, if necessary to employ concepts of the various patents, applications and publications to provide yet further embodiments.

[0465] These and other changes can be made to the embodiments in light of the above-detailed description. In general, in the following claims, the terms used should not be construed to limit the claims to the specific embodiments disclosed in the specification and the claims, but should be construed to include all possible embodiments along with the full scope of equivalents to which such claims are entitled. Accordingly, the claims are not limited by the disclosure.

What is claimed is:

1. A double-stranded RNA comprising
a) a first strand that hybridizes to a target CAG repeat region of a CAG repeat containing RNA; and
b) a second strand that hybridizes to the first strand,
wherein the first strand comprises:
i) a first mismatch to the target CAG repeat region; and
ii) at least a second mismatch to the target CAG repeat region,
wherein:
i) when the first mismatch is at position 8 based on the numbering of SEQ ID NO:743 (CUGCUGCUGCUGCUGCUGCUG (SEQ ID NO:743)), SEQ ID NO:866(GCUGCUGCUGCUGCUGCUGCU (SEQ ID NO:866)), or SEQ ID NO:867 (UGCUGCUGCUGCUGCUGCUGC (SEQ ID NO:867)), the second mismatch is from is from 1 to 8 bases 3′ of the first mismatch;
ii) when the first mismatch is at position 9 based on the numbering of SEQ ID NO:743 (CUGCUGCUGCUGCUGCUGCUG (SEQ ID NO:743)), SEQ ID NO:866 (GCUGCUGCUGCUGCUGCUGCU (SEQ ID NO:866)), or SEQ ID NO:867 (UGCUGCUGCUGCUGCUGCUGC (SEQ ID NO:867), the second mismatch is from 1 to 7 bases 3′ of the first mismatch;
iii) when the first mismatch is at position 10 based on the numbering of SEQ ID NO:743 (CUGCUGCUGCUGCUGCUGCUG (SEQ ID NO:743)), SEQ ID NO:866 (GCUGCUGCUGCUGCUGCUGCU (SEQ ID NO:866)), or (UGCUGCUGCUGCUGCUGCUGC (SEQ ID NO:867)), the second mismatch is from 1 to 6 bases 3′ of the first mismatch; and
iv) when the first mismatch is at position 11 based on the numbering of SEQ ID NO:743 (CUGCUGCUGCUGCUGCUGCUG (SEQ ID NO:/743)), SEQ ID NO:866 (GCUGCUGCUGCUGCUGCUGCU (SEQ ID NO:866)), or (UGCUGCUGCUGCUGCUGCUGC (SEQ ID NO:867)), the second mismatch is from 1 to 5 bases 3′ of the first mismatch.

2. The double-stranded RNA of claim 1, wherein each mismatch is generated by a substitution that is independently selected from:
a) a substitution of a G with an A, a U, or a C;
b) a substitution of a U with an A, a G, or a C;
c) a substitution of a C with an A, a U, or a G.

3. The double-stranded RNA of claim 1 or claim 2, wherein the first strand comprises:
i) a first mismatch to the target CAG repeat region, wherein the first mismatch is at position 8 based on the numbering of SEQ ID NO:743 (CUGCUGCUGCUGCUGCUGCUG (SEQ ID NO:743)), SEQ ID NO:866 (GCUGCUGCUGCUGCUGCUGCU (SEQ ID NO:866)), or SEQ ID NO:867 (UGCUGCUGCUGCUGCUGCUGC (SEQ ID NO:867)); and
ii) a second mismatch to the target CAG repeat region, wherein the second mismatch is from 1 to 8 bases 3′ of the first mismatch.

4. The double-stranded RNA of any one of claims 1-3, wherein the first strand is a variant comprising at least a first and a second substitution of the nucleotide sequence: CUGCUGCUGCUGCUGCUGCUG (SEQ ID NO:743) wherein the first substitution generates the first mismatch and is at position 8 based on the numbering of CUGCUGCUGCUGCUGCUGCUG (SEQ ID NO:743) and the second substitution generates the second mismatch and is from 1 to 8 bases 3′ of the first mismatch.

5. The double-stranded RNA of any one of claims 1-3, wherein the first strand is a variant comprising at least a first and a second substitution of the nucleotide sequence: GCUGCUGCUGCUGCUGCUGCU (SEQ ID NO:866), wherein the first substitution generates the first mismatch and is at position 8 based on the numbering of GCUGCUGCUGCUGCUGCUGCU (SEQ ID NO:866), and the second substitution generates the second mismatch and is from 1 to 8 bases 3′ of the first mismatch.

6. The double-stranded RNA of any one of claims 1-3, wherein the first strand is a variant comprising at least a first and a second substitution of the nucleotide sequence: UGCUGCUGCUGCUGCUGCUGC (SEQ ID NO:867), wherein the first substitution generates the first mismatch and is at position 8 based on the numbering of UGCUGCUGCUGCUGCUGCUGC (SEQ ID NO:867), and the second substitution generates the second mismatch and is from 1 to 8 bases 3′ of the first mismatch.

7. The double-stranded RNA of any one of claims 3-6, wherein the first strand comprises no more than 2 mismatches with the target CAG repeat region.

8. The double-stranded RNA of any one of claims 3-6, wherein the first strand comprises no more than 3 mismatches with the target CAG repeat region.

9. The double-stranded RNA of any one of claims 3-6, wherein the first strand comprises no more than 4 mismatches with the target CAG repeat region.

10. The double-stranded RNA of claim 3 or claim 4, wherein the first strand comprises a nucleotide sequence selected from:
i)
(SEQ ID NO: 317)
CUGCUGCAACUGCUGCUGCUG (CUG_NA_B);
ii)
(SEQ ID NO: 318)
CUGCUGCAGAUGCUGCUGCUG (CUG_NA_C);
iii)
(SEQ ID NO: 319)
CUGCUGCAGCAGCUGCUGCUG (CUG_NA_D);
iv)
(SEQ ID NO: 320)
CUGCUGCAGCUACUGCUGCUG(CUG_NA_E);
v)
(SEQ ID NO: 321)
CUGCUGCAGCUGAUGCUGCUG (CUG_NA_F);
vi)
(SEQ ID NO: 322)
CUGCUGCAGCUGCAGCUGCUG (CUG_NA_G);
vii)
(SEQ ID NO: 323)
CUGCUGCAGCUGCUACUGCUG (CUG_NA_H);
and
viii)
(SEQ ID NO: 324)
CUGCUGCAGCUGCUGAUGCUG (CUG_NA_I).

11. The double-stranded RNA of claim 3 or claim 4, wherein the first strand comprises a nucleotide sequence selected from SEQ ID NOs:804-819.

12. The double-stranded RNA of claim 1 or claim 2, wherein the first strand comprises a first mismatch to the target CAG repeat region, wherein the first mismatch is at position 8 based on the numbering of SEQ ID NO:743 (CUGCUGCUGCUGCUGCUGCUG (SEQ ID NO:743)), SEQ ID NO:866 (GCUGCUGCUGCUGCUGCUGCU (SEQ ID NO:866)), or SEQ ID NO:867 (UGCUGCUGCUGCUGCUGCUGC (SEQ ID NO:867)); wherein the first strand comprises a second mismatch and a third mismatch to the target CAG repeat region, and wherein the second and third mismatches are from 1 to 8 bases 3′ of the first mismatch.

13. The double-stranded RNA of any one of claims 1, 2, and 12, wherein the first strand is a variant comprising at least a first, a second, and a third substitution of the nucleotide sequence CUGCUGCUGCUGCUGCUGCUG (SEQ ID NO:743), wherein the first substitution generates the first mismatch and is at position 8 based on the numbering of CUGCUGCUGCUGCUGCUGCUG (SEQ ID NO:743), wherein the second substitution generates the second mismatch and the third substitution generates the third mismatch, and wherein the second substitution and the third substitution are from 1 to 8 bases 3′ of the first mismatch.

14. The double-stranded RNA of any one of claims 1, 2, and 12, wherein the first strand is a variant comprising at least a first, a second, and a third substitution of the nucleotide sequence GCUGCUGCUGCUGCUGCUGCU (SEQ ID NO:866), and wherein the first substitution generates the first mismatch and is at position 8 based on the numbering of GCUGCUGCUGCUGCUGCUGCU (SEQ ID NO:866), wherein the second substitution generates the second mismatch and the third substitution generates the third mismatch, and wherein the second substitution and the third substitution are from 1 to 8 bases 3′ of the first mismatch.

15. The double-stranded RNA of any one of claims 1, 2, and 12, wherein the first strand is a variant comprising at least a first, a second, and a third substitution of the nucleotide sequence UGCUGCUGCUGCUGCUGCUGC (SEQ ID NO:867), and wherein the first substitution generates the first mismatch and is at position 8 based on the numbering of UGCUGCUGCUGCUGCUGCUGC (SEQ ID NO:867), wherein the second substitution generates the second mismatch and the third substitution generates the third mismatch, and wherein the second substitution and the third substitution are from 1 to 8 bases 3′ of the first mismatch.

16. The double-stranded RNA of any one of claims 12-15, wherein the first strand comprises no more than 3 mismatches with the target CAG repeat region.

17. The double-stranded RNA of any one of claims 12-15, wherein the first strand comprises no more than 4 mismatches with the target CAG repeat region.

18. The double-stranded RNA of claim 1 or claim 2, wherein the first strand comprises a first mismatch to the target CAG repeat region, wherein the first mismatch is at position 8 based on the numbering of SEQ ID NO:743 (CUGCUGCUGCUGCUGCUGCUG (SEQ ID NO:743)), SEQ ID NO:866 (GCUGCUGCUGCUGCUGCUGCU (SEQ ID NO:866)), or SEQ ID NO:867 (UGCUGCUGCUGCUGCUGCUGC (SEQ ID NO:867)); wherein the first strand comprises a second mismatch, a third mismatch, and a fourth mismatch to the target CAG repeat region, and wherein the second, third, and fourth mismatches are from 1 to 8 bases 3′ of the first mismatch.

19. The double-stranded RNA of any one of claims 1, 2, and 18, wherein the first strand is a variant comprising at least a first, a second, a third, and a fourth substitution of the nucleotide sequence CUGCUGCUGCUGCUGCUGCUG (SEQ ID NO:743), wherein the first substitution generates the first mismatch and is at position 8 based on the numbering of CUGCUGCUGCUGCUGCUGCUG (SEQ ID NO:743), wherein the second substitution generates the second mismatch, the third substitution generates the third mismatch, and the fourth substitution generates the fourth mismatch, and wherein the second, third, and fourth substitutions are from 1 to 8 bases 3′ of the first mismatch.

20. The double-stranded RNA of any one of claims 1, 2, and 18, wherein the first strand is a variant comprising at least a first, a second, a third, and a fourth substitution of the nucleotide sequence GCUGCUGCUGCUGCUGCUGCU (SEQ ID NO:866), wherein the first substitution generates the first mismatch and is at position 8 based on the numbering of GCUGCUGCUGCUGCUGCUGCU (SEQ ID NO:866), wherein the second substitution generates the second mismatch, the third substitution generates the third mismatch, and the fourth substitution generates the fourth mismatch, and wherein the second, third, and fourth substitutions are from 1 to 8 bases 3′ of the first mismatch.

21. The double-stranded RNA of any one of claims 1, 2, and 18, wherein the first strand is a variant comprising at least a first, a second, a third, and a fourth substitution of the nucleotide sequence UGCUGCUGCUGCUGCUGCUGC (SEQ ID NO:867), wherein the first substitution generates the first mismatch and is at position 8 based on the numbering of UGCUGCUGCUGCUGCUGCUGC (SEQ ID NO:867), wherein the second substitution generates the second mismatch, the third substitution generates the third mismatch, and the fourth substitution generates the fourth mismatch, and wherein the second, third, and fourth substitutions are from 1 to 8 bases 3′ of the first mismatch.

22. The double-stranded RNA of any one of claims 18-21, wherein the first strand comprises no more than 4 mismatches with the target CAG repeat region.

23. The double-stranded RNA of claim 1 or claim 2, wherein the first strand comprises:
i) a first mismatch to the target CAG repeat region, wherein the first mismatch is at position 9 based on the numbering of SEQ ID NO:743 (CUGCUGCUGCUGCUGCUGCUG (SEQ ID NO:743)), SEQ ID NO:866 (GCUGCUGCUGCUGCUGCUGCU (SEQ ID NO:866)), or SEQ ID NO:867 (UGCUGCUGCUGCUGCUGCUGC (SEQ ID NO:867), and
ii) a second mismatch to the target CAG repeat region, wherein the second mismatch is from 1 to 7 bases 3′ of the first mismatch.

24. The double-stranded RNA of any one of claims 1, 2, and 23, wherein the first strand is a variant comprising at least a first and a second substitution of the nucleotide sequence CUGCUGCUGCUGCUGCUGCUG (SEQ ID NO:743), wherein the first substitution generates the first mismatch and is at position 9 based on the numbering of CUGCUGCUGCUGCUGCUGCUG (SEQ ID NO:743), and the second substitution generates the second mismatch and is from 1 to 7 bases 3′ of the first mismatch.

25. The double-stranded RNA of any one of claims 1, 2, and 23, wherein the first strand is a variant comprising at least a first and a second substitution of the nucleotide sequence GCUGCUGCUGCUGCUGCUGCU (SEQ ID NO:866), wherein the first substitution generates the first mismatch and is at position 9 based on the numbering of GCUGCUGCUGCUGCUGCUGCU (SEQ ID NO:866), and the second substitution generates the second mismatch and is from 1 to 7 bases 3′ of the first mismatch.

26. The double-stranded RNA of any one of claims 1, 2, and 23, wherein the first strand is a variant comprising at least a first and a second substitution of the nucleotide sequence UGCUGCUGCUGCUGCUGCUGC (SEQ ID NO:867), wherein the first substitution generates the first mismatch and is at position 9 based on the numbering of UGCUGCUGCUGCUGCUGCUGC (SEQ ID NO:867), and the second substitution generates the second mismatch and is from 1 to 7 bases 3′ of the first mismatch.

27. The double-stranded RNA of claim 23, wherein the first strand comprises a nucleotide sequence selected from SEQ ID NOs:298-304.

28. The double-stranded RNA of any one of claims 23-27, wherein the first strand comprises no more than 2 mismatches with the target CAG repeat region.

29. The double-stranded RNA of any one of claims 23-27, wherein the first strand comprises no more than 3 mismatches with the target CAG repeat region.

30. The double-stranded RNA of any one of claims 23-27, wherein the first strand comprises no more than 4 mismatches with the target CAG repeat region.

31. The double-stranded RNA of claim 1 or claim 2, wherein the first mismatch is at position 9 based on the numbering of SEQ ID NO:743 (CUGCUGCUGCUGCUGCUGCUG (SEQ ID NO:743)), SEQ ID NO:866 (GCUGCUGCUGCUGCUGCUGCU (SEQ ID NO:866)), or SEQ ID NO:867 (UGCUGCUGCUGCUGCUGCUGC (SEQ ID NO:867), wherein the first strand comprises a second mismatch and a third mismatch to the target CAG repeat region, and wherein the second and third mismatches are from 1 to 7 bases 3′ of the first mismatch.

32. The double-stranded RNA of any one of claims 1, 2, and 31, wherein the first strand is a variant comprising at least a first, a second, and a third substitution of the nucleotide sequence CUGCUGCUGCUGCUGCUGCUG (SEQ ID NO:743), wherein the first substitution generates the first mismatch and is at position 9 based on the numbering of CUGCUGCUGCUGCUGCUGCUG (SEQ ID NO:743), wherein the second substitution generates the second mismatch and the third substitution generates the third mismatch, and wherein the second substitution and the third substitution are from 1 to 7 bases 3′ of the first mismatch.

33. The double-stranded RNA of any one of claims 1, 2, and 31, wherein the first strand is a variant comprising at least a first, a second, and a third substitution of the nucleotide sequence GCUGCUGCUGCUGCUGCUGCU (SEQ ID NO:866), wherein the first substitution generates the first mismatch and is at position 9 based on the numbering of GCUGCUGCUGCUGCUGCUGCU (SEQ ID NO:866), wherein the second substitution generates the second mismatch and the third substitution generates the third mismatch, and wherein the second substitution and the third substitution are from 1 to 7 bases 3′ of the first mismatch.

34. The double-stranded RNA of any one of claims 1, 2, and 31, wherein the first strand is a variant comprising at least a first, a second, and a third substitution of the nucleotide sequence UGCUGCUGCUGCUGCUGCUGC (SEQ ID NO:867), wherein the first substitution generates the first mismatch and is at position 9 based on the numbering of UGCUGCUGCUGCUGCUGCUGC (SEQ ID NO:867), wherein the second substitution generates the second mismatch and the third substitution generates the third mismatch, and wherein the second substitution and the third substitution are from 1 to 7 bases 3′ of the first mismatch.

35. The double-stranded RNA of any one of claims 31-34, wherein the first strand comprises no more than 3 mismatches with the target CAG repeat region.

36. The double-stranded RNA of any one of claims 31-34, wherein the first strand comprises no more than 4 mismatches with the target CAG repeat region.

37. The double-stranded RNA of claim 31, wherein the first strand comprises a nucleotide sequence selected from:
i)
(SEQ ID NO: 325)
CUGCUGCUAAAGCUGCUGCUG (CUG_307);
ii)
(SEQ ID NO: 326)
CUGCUGCUAAUACUGCUGCUG (CUG_334);
iii)
(SEQ ID NO: 327)
CUGCUGCUAAUGAUGCUGCUG (CUG_361);
iv)
(SEQ ID NO: 328)
CUGCUGCUAAUGCAGCUGCUG (CUG_388);
v)
(SEQ ID NO: 329)
CUGCUGCUAAUGCUACUGCUG (CUG_415);
vi)
(SEQ ID NO: 330)
CUGCUGCUACAGAUGCUGCUG (CUG_631);
vii)
(SEQ ID NO: 331)
CUGCUGCUACAGCAGCUGCUG (CUG_658);
viii)
(SEQ ID NO: 332)
CUGCUGCUACAGCUGAUGCUG (CUG_712);
ix)
(SEQ ID NO: 336)
CUGCUGCUAAUGCUGAUGCUG (CUG_442);
x)
(SEQ ID NO: 337)
CUGCUGCUACAACUGCUGCUG (CUG_604);
and
xi)
(SEQ ID NO: 338)
CUGCUGCUACAGCUACUGCUG (CUG_685).

38. The double-stranded RNA of claim 1 or claim 2, wherein the first strand comprises a first mismatch to the target CAG repeat region, wherein the first mismatch is at position 9 based on the numbering of SEQ ID NO:743 (CUGCUGCUGCUGCUGCUGCUG (SEQ ID NO:743)), SEQ ID NO:866 (GCUGCUGCUGCUGCUGCUGCU (SEQ ID NO:866)), or SEQ ID NO:867 (UGCUGCUGCUGCUGCUGCUGC (SEQ ID NO:867), wherein the first strand comprises a second mismatch, a third mismatch, and a fourth mismatch to the target CAG repeat region, and wherein the second, third, and fourth mismatches are from 1 to 7 bases 3′ of the first mismatch.

39. The double-stranded RNA of any one of claims 1, 2, and 38, wherein the first strand is a variant comprising at least a first, a second, a third, and a fourth substitution of the nucleotide sequence CUGCUGCUGCUGCUGCUGCUG (SEQ ID NO:743), wherein the first substitution generates the first mismatch and is at position 9 based on the numbering of CUGCUGCUGCUGCUGCUGCUG (SEQ ID NO: 743), wherein the second substitution generates the second mismatch, the third substitution generates the third mismatch, and the fourth substitution generates the fourth mismatch, and wherein the second, third, and fourth substitutions are from 1 to 7 bases 3′ of the first mismatch.

40. The double-stranded RNA of any one of claims 1, 2, and 38, wherein the first strand is a variant comprising at least a first, a second, a third, and a fourth substitution of the nucleotide sequence GCUGCUGCUGCUGCUGCUGCU (SEQ ID NO:866), wherein the first substitution generates the first mismatch and is at position 9 based on the numbering of GCUGCUGCUGCUGCUGCUGCU (SEQ ID NO:866), wherein the second substitution generates the second mismatch, the third substitution generates the third mismatch, and the fourth substitution generates the fourth mismatch, and wherein the second, third, and fourth substitutions are from 1 to 7 bases 3′ of the first mismatch.

41. The double-stranded RNA of any one of claims 1, 2, and 38, wherein the first strand is a variant comprising at least a first, a second, a third, and a fourth substitution of the nucleotide sequence UGCUGCUGCUGCUGCUGCUGC (SEQ ID NO:867), wherein the first substitution generates the first mismatch and is at position 9 based on the numbering of UGCUGCUGCUGCUGCUGCUGC (SEQ ID NO:867), wherein the second substitution generates the second mismatch, the third substitution generates the third mismatch, and the fourth substitution generates the fourth mismatch, and wherein the second, third, and fourth substitutions are from 1 to 7 bases 3′ of the first mismatch.

42. The double-stranded RNA of any one of claims 38-41, wherein the first strand comprises no more than 4 mismatches with the target CAG repeat region.

43. The double-stranded RNA of claim 38, wherein the first strand comprises a nucleotide sequence selected from SEQ ID NOs:341-344.

44. The double-stranded RNA of claim 38, wherein the first strand comprises a nucleotide sequence selected from SEQ ID NOs:347-367.

45. The double-stranded RNA of claim 1 or claim 2, wherein the first strand comprises:
i) a first mismatch to the target CAG repeat region, wherein the first mismatch is at position 10 based on the numbering of SEQ ID NO:743 (CUGCUGCUGCUGCUGCUGCUG (SEQ ID NO:743)), SEQ ID NO:866 (GCUGCUGCUGCUGCUGCUGCU (SEQ ID NO:866)), or (UGCUGCUGCUGCUGCUGCUGC (SEQ ID NO:867)); and
ii) a second mismatch to the target CAG repeat region, wherein the second mismatch is from 1 to 6 bases 3′ of the first mismatch.

46. The double-stranded RNA of any one of claims 1, 2, or 45, wherein the first strand is a variant comprising at least a first and a second substitution of the nucleotide sequence CUGCUGCUGCUGCUGCUGCUG (SEQ ID NO:743), wherein the first substitution generates the first mismatch and is at position 10 based on the numbering of CUGCUGCUGCUGCUGCUGCUG (SEQ ID NO:743), and wherein the second substitution generates the second mismatch and is from 1 to 6 bases 3′ of the first mismatch.

47. The double-stranded RNA of any one of claims 1, 2, or 45, wherein the first strand is a variant comprising at least a first and a second substitution of the nucleotide sequence GCUGCUGCUGCUGCUGCUGCU (SEQ ID NO:866), wherein the first substitution generates the first mismatch and is at position 10 based on the numbering of GCUGCUGCUGCUGCUGCUGCU (SEQ ID NO:866), and wherein the second substitution generates the second mismatch and is from 1 to 6 bases 3′ of the first mismatch.

48. The double-stranded RNA of any one of claims 1, 2, or 45, wherein the first strand is a variant comprising at least a first and a second substitution of the nucleotide sequence UGCUGCUGCUGCUGCUGCUGC (SEQ ID NO:867), wherein the first substitution generates the first mismatch and is at position 10 based on the numbering of UGCUGCUGCUGCUGCUGCUGC (SEQ ID NO:867), and wherein the second substitution generates the second mismatch and is from 1 to 6 bases 3′ of the first mismatch.

49. The double-stranded RNA of any one of claims 45-48, wherein the first strand comprises no more than 2 mismatches with the target CAG repeat region.

50. The double-stranded RNA of any one of claims 45-48, wherein the first strand comprises no more than 3 mismatches with the target CAG repeat region.

51. The double-stranded RNA of any one of claims 45-48, wherein the first strand comprises no more than 4 mismatches with the target CAG repeat region.

52. The double-stranded RNA of claim 45, wherein the first strand comprises a nucleotide sequence selected from SEQ ID NOs:305-310.

53. The double-stranded RNA of claim 1 or claim 2, wherein the first mismatch is at position 10 based on the numbering of SEQ ID NO:743 (CUGCUGCUGCUGCUGCUGCUG (SEQ ID NO:743)), SEQ ID NO:866 (GCUGCUGCUGCUGCUGCUGCU (SEQ ID NO:866)), or (UGCUGCUGCUGCUGCUGCUGC (SEQ ID NO:867)), wherein the first strand comprises a second mismatch and a third mismatch to the target CAG repeat region, and wherein the second and third mismatches are from 1 to 6 bases 3′ of the first mismatch.

54. The double-stranded RNA of any one of claims 1, 2, or 53, wherein the first strand is a variant comprising at least a first, a second, and a third substitution of the nucleotide sequence CUGCUGCUGCUGCUGCUGCUG (SEQ ID NO:743), wherein the first substitution generates the first mismatch and is at position 10 based on the numbering of CUGCUGCUGCUGCUGCUGCUG (SEQ ID NO:743), wherein the second substitution generates the second mismatch and the third substitution generates the third mismatch, and wherein the second substitution and the third substitution are from 1 to 6 bases 3′ of the first mismatch.

55. The double-stranded RNA of any one of claims 1, 2, or 53, wherein the first strand is a variant comprising at least a first, a second, and a third substitution of the nucleotide sequence GCUGCUGCUGCUGCUGCUGCU (SEQ ID NO:866), wherein the first substitution generates the first mismatch and is at position 10 based on the numbering of GCUGCUGCUGCUGCUGCUGCU (SEQ ID NO:866), wherein the second substitution generates the second mismatch and the third substitution generates the third mismatch, and wherein the second substitution and the third substitution are from 1 to 6 bases 3′ of the first mismatch.

56. The double-stranded RNA of any one of claims 1, 2, or 53, wherein the first strand is a variant comprising at least a first, a second, and a third substitution of the nucleotide sequence UGCUGCUGCUGCUGCUGCUGC (SEQ ID NO:867), wherein the first substitution generates the first mismatch and is at position 10 based on the numbering UGCUGCUGCUGCUGCUGCUGC (SEQ ID NO:867), wherein the second substitution generates the second mismatch and the third substitution generates the third mismatch, and wherein the second substitution and the third substitution are from 1 to 6 bases 3′ of the first mismatch.

57. The double-stranded RNA of any one of claims 53-56, wherein the first strand comprises no more than 3 mismatches with the target CAG repeat region.

58. The double-stranded RNA of any one of claims 53-56, wherein the first strand comprises no more than 4 mismatches with the target CAG repeat region.

59. The double-stranded RNA of claim 53, wherein the first strand comprises a nucleotide sequence selected from:
i)
(SEQ ID NO: 333)
CUGCUGCUGAAGAUGCUGCUG (CUG_2116);
ii)
(SEQ ID NO: 334)
CUGCUGCUGAAGCAGCUGCUG (CUG_2143);
iii)
(SEQ ID NO: 335)
CUGCUGCUGAAGCUACUGCUG (CUG_2170);
iv)
(SEQ ID NO: 339)
CUGCUGCUGAAACUGCUGCUG (CUG_2089);
and
v)
(SEQ ID NO: 340)
CUGCUGCUGAAGCUGAUGCUG (CUG_2197).

60. The double-stranded RNA of claim 1 or claim 2, wherein the first strand comprises a first mismatch to the target CAG repeat region, wherein the first mismatch is at position 10 based on the numbering of SEQ ID NO:743 (CUGCUGCUGCUGCUGCUGCUG (SEQ ID NO:743)), SEQ ID NO:866 (GCUGCUGCUGCUGCUGCUGCU (SEQ ID NO:866)), or (UGCUGCUGCUGCUGCUGCUGC (SEQ ID NO:867)), wherein the first strand comprises a second mismatch, a third mismatch, and a fourth mismatch to the target CAG repeat region, and wherein the second, third, and fourth mismatches are from 1 to 6 bases 3′ of the first mismatch.

61. The double-stranded RNA of claim 1, 2, or 60, wherein the first strand is a variant comprising at least a first, a second, a third, and a fourth substitution of the nucleotide sequence CUGCUGCUGCUGCUGCUGCUG (SEQ ID NO:743), wherein the first substitution generates the first mismatch and is at position 10 based on the numbering of CUGCUGCUGCUGCUGCUGCUG (SEQ ID NO:743), wherein the second substitution generates the second mismatch, the third substitution generates the third mismatch, and the fourth substitution generates the fourth mismatch, and wherein the second, third, and fourth substitutions are from 1 to 6 bases 3′ of the first mismatch.

62. The double-stranded RNA of claim 1, 2, or 60, wherein the first strand is a variant comprising at least a first, a second, a third, and a fourth substitution of the nucleotide sequence GCUGCUGCUGCUGCUGCUGCU (SEQ ID NO:866), wherein the first substitution generates the first mismatch and is at position 10 based on the numbering of CUGCUGCUGCUGCUGCUGCUG (SEQ ID NO:866), wherein the second substitution generates the second mismatch, the third substitution generates the third mismatch, and the fourth substitution generates the fourth mismatch, and wherein the second, third, and fourth substitutions are from 1 to 6 bases 3′ of the first mismatch.

63. The double-stranded RNA of claim 1, 2, or 60, wherein the first strand is a variant comprising at least a first, a second, a third, and a fourth substitution of the nucleotide sequence UGCUGCUGCUGCUGCUGCUGC (SEQ ID NO:867), wherein the first substitution generates the first mismatch and is at position 10 based on the numbering of UGCUGCUGCUGCUGCUGCUGC (SEQ ID NO:867), wherein the second substitution generates the second mismatch, the third substitution generates the third mismatch, and the fourth substitution generates the fourth mismatch, and wherein the second, third, and fourth substitutions are from 1 to 6 bases 3′ of the first mismatch.

64. The double-stranded RNA of any one of claims 60-63, wherein the first strand comprises no more than 4 mismatches with the target CAG repeat region.

65. The double-stranded RNA of claim 60, wherein the first strand comprises a nucleotide sequence selected from SEQ ID NOs:345, 346, and 368-375.

66. The double-stranded RNA of claim 1 or claim 2, wherein the first strand comprises:
i) a first mismatch to the target CAG repeat region, wherein the first mismatch is at position 11 based on the numbering of SEQ ID NO:743 (CUGCUGCUGCUGCUGCUGCUG (SEQ ID NO:743)), SEQ ID NO:866 (GCUGCUGCUGCUGCUGCUGCU (SEQ ID NO:866)), or (UGCUGCUGCUGCUGCUGCUGC (SEQ ID NO:867)); and
ii) a second mismatch to the target CAG repeat region, wherein the second mismatch is from 1 to 5 bases 3′ of the first mismatch.

67. The double-stranded RNA of any one of claims 1, 2, and 66, wherein the first strand is a variant comprising at least a first and a second substitution of the nucleotide sequence CUGCUGCUGCUGCUGCUGCUG (SEQ ID NO:743), wherein the first substitution generates the first mismatch and is at position 11 based on the numbering of CUGCUGCUGCUGCUGCUGCUG (SEQ ID NO:743), and the second substitution generates the second mismatch and is from 1 to 5 bases 3′ of the first mismatch.

68. The double-stranded RNA of any one of claims 1, 2, and 66, wherein the first strand is a variant comprising at least a first and a second substitution of the nucleotide sequence GCUGCUGCUGCUGCUGCUGCU (SEQ ID NO:866), wherein the first substitution generates the first mismatch and is at position 11 based on the numbering of GCUGCUGCUGCUGCUGCUGCU (SEQ ID NO:866), and the second substitution generates the second mismatch and is from 1 to 5 bases 3′ of the first mismatch.

69. The double-stranded RNA of any one of claims 1, 2, and 66, wherein the first strand is a variant comprising at least a first and a second substitution of the nucleotide sequence UGCUGCUGCUGCUGCUGCUGC (SEQ ID NO:867), wherein the first substitution generates the first mismatch and is at position 11 based on the numbering of UGCUGCUGCUGCUGCUGCUGC (SEQ ID NO:867), and the second substitution generates the second mismatch and is from 1 to 5 bases 3′ of the first mismatch.

70. The double-stranded RNA of any one of claims 66-69, wherein the first strand comprises no more than 2 mismatches with the target CAG repeat region.

71. The double-stranded RNA of any one of claims 66-69, wherein the first strand comprises no more than 3 mismatches with the target CAG repeat region.

72. The double-stranded RNA of any one of claims 66-69, wherein the first strand comprises no more than 4 mismatches with the target CAG repeat region.

73. The double-stranded RNA of claim 66, wherein the first strand comprises a nucleotide sequence selected from:
i)
(SEQ ID NO: 311)
CUGCUGCUGCAACUGCUGCUG (CUG_217);
ii)
(SEQ ID NO: 312)
CUGCUGCUGCAGAUGCUGCUG (CUG_226);
iii)
(SEQ ID NO: 313)
CUGCUGCUGCAGCAGCUGCUG (CUG_235);
iv)
(SEQ ID NO: 314)
CUGCUGCUGCAGCUACUGCUG (CUG_244);
and
v)
(SEQ ID NO: 315)
CUGCUGCUGCAGCUGAUGCUG (CUG_253).

74. The double-stranded RNA of claim 66, wherein the first strand comprises a nucleotide sequence selected from SEQ ID NOs:793-803.

75. The double-stranded RNA of claim 1 or claim 2, wherein the first strand comprises a first mismatch to the target CAG repeat region, wherein the first mismatch is at position 11 based on the numbering of SEQ ID NO:743 (CUGCUGCUGCUGCUGCUGCUG (SEQ ID NO:743)), SEQ ID NO:866 (GCUGCUGCUGCUGCUGCUGCU (SEQ ID NO:866)), or (UGCUGCUGCUGCUGCUGCUGC (SEQ ID NO:867)); and wherein the first strand comprises a second mismatch and a third mismatch to the target CAG repeat region, and wherein the second and third mismatches are from 1 to 5 bases 3′ of the first mismatch.

76. The double-stranded RNA of any one of claims 1, 2, and 75, wherein the first strand is a variant comprising at least a first, a second, and a third substitution of the nucleotide sequence CUGCUGCUGCUGCUGCUGCUG (SEQ ID NO:743), wherein the first substitution generates the first mismatch and is at position 11 based on the numbering of CUGCUGCUGCUGCUGCUGCUG (SEQ ID NO:743), wherein the second substitution generates the second mismatch and the third substitution generates the third mismatch, and wherein the second substitution and the third substitution are from 1 to 5 bases 3′ of the first mismatch.

77. The double-stranded RNA of any one of claims 1, 2, and 75, wherein the first strand is a variant comprising at least a first, a second, and a third substitution of the nucleotide sequence GCUGCUGCUGCUGCUGCUGCU (SEQ ID NO:866), wherein the first substitution generates the first mismatch and is at position 11 based on the numbering of GCUGCUGCUGCUGCUGCUGCU (SEQ ID NO:866), wherein the second substitution generates the second mismatch and the third substitution generates the third mismatch, and wherein the second substitution and the third substitution are from 1 to 5 bases 3′ of the first mismatch.

78. The double-stranded RNA of any one of claims 1, 2, and 75, wherein the first strand is a variant comprising at least a first, a second, and a third substitution of the nucleotide sequence UGCUGCUGCUGCUGCUGCUGC (SEQ ID NO:867), wherein the first substitution generates the first mismatch and is at position 11 based on the numbering of UGCUGCUGCUGCUGCUGCUGC (SEQ ID NO:867), wherein the second substitution generates the second mismatch and the third substitution generates the third mismatch, and wherein the second substitution and the third substitution are from 1 to 5 bases 3′ of the first mismatch.

79. The double-stranded RNA of any one of claims 75-78, wherein the first strand comprises no more than 3 mismatches with the target CAG repeat region.

80. The double-stranded RNA of any one of claims 75-78, wherein the first strand comprises no more than 4 mismatches with the target CAG repeat region.

81. The double-stranded RNA of claim 1 or claim 2, wherein the first strand comprises a first mismatch to the target CAG repeat region, wherein the first mismatch is at position 11 (CUGCUGCUGCUGCUGCUGCUG (SEQ ID NO:743)), SEQ ID NO:866 (GCUGCUGCUGCUGCUGCUGCU (SEQ ID NO:866)), or (UGCUGCUGCUGCUGCUGCUGC (SEQ ID NO:867)), wherein the first strand comprises a second mismatch, a third mismatch, and a fourth mismatch to the target CAG repeat region, and wherein the second, third, and fourth mismatches are from 1 to 5 bases 3′ of the first mismatch.

82. The double-stranded RNA of any one of claims 1, 2, and 81, wherein the first strand is a variant comprising at least a first, a second, a third, and a fourth substitution of the nucleotide sequence CUGCUGCUGCUGCUGCUGCUG (SEQ ID NO:743), wherein the first substitution generates the first mismatch and is at position 11 based on the numbering of CUGCUGCUGCUGCUGCUGCUG (SEQ ID NO:743), wherein the second substitution generates the second mismatch, the third substitution generates the third mismatch, and the fourth substitution generates the fourth mismatch, and wherein the second, third, and fourth substitutions are from 1 to 5 bases 3′ of the first mismatch.

83. The double-stranded RNA of any one of claims 1, 2, and 81, wherein the first strand is a variant comprising at least a first, a second, a third, and a fourth substitution of the nucleotide sequence GCUGCUGCUGCUGCUGCUGCU (SEQ ID NO:866), wherein the first substitution generates the first mismatch and is at position 11 based on the numbering of GCUGCUGCUGCUGCUGCUGCU (SEQ ID NO:866), wherein the second substitution generates the second mismatch, the third substitution generates the third mismatch, and the fourth substitution generates the fourth mismatch, and wherein the second, third, and fourth substitutions are from 1 to 5 bases 3′ of the first mismatch.

84. The double-stranded RNA of any one of claims 1, 2, and 81, wherein the first strand is a variant comprising at least a first, a second, a third, and a fourth substitution of the nucleotide sequence UGCUGCUGCUGCUGCUGCUGC (SEQ ID NO:867), wherein the first substitution generates the first mismatch and is at position 11 based on the numbering of UGCUGCUGCUGCUGCUGCUGC (SEQ ID NO:867), wherein the second substitution generates the second mismatch, the third substitution generates the third mismatch, and the fourth substitution generates the fourth mismatch, and wherein the second, third, and fourth substitutions are from 1 to 5 bases 3′ of the first mismatch.

85. The double-stranded RNA of any one of claims 81-84, wherein the first strand comprises no more than 4 mismatches with the target CAG repeat region.

86. The double-stranded RNA of any one of claims 1-85, wherein the second strand is 100% complementary to the first strand.

87. The double-stranded RNA of any one of claims 1-85, wherein the second strand comprises from 1 to 10 mismatches, from 3 to 5 mismatches, from 4 to 7 mismatches, or from 5 to 10 mismatches, to the first strand.

88. The double-stranded RNA of any one of claims 1-85, wherein the double-stranded RNA has a length of from 18 bases to 25 nucleotides, from 19 to 25 nucleotides, from 19 to 23 nucleotides, or from 19 to 21 nucleotides.

89. The double-stranded RNA of any one of claims 1-85, wherein the double-stranded RNA has a length of from 21 nucleotides to 25 nucleotides.

90. A DNA molecule comprising a nucleotide sequence encoding the first strand as set forth in any one of claims 1-89, wherein the nucleotide sequence is operably linked to a promoter that is functional in a eukaryotic cell.

91. A recombinant nucleic acid comprising:
a1) the double-stranded RNA of any one of claims 1-89; and
b1) a microRNA scaffold comprising a 5′ flanking polynucleotide, a loop polynucleotide, and a 3′ flanking polynucleotide,
wherein the recombinant nucleic acid comprises:
i) the 5′ flanking polynucleotide;
ii) the first strand of the double-stranded RNA;
iii) the loop polynucleotide;
iv) the second strand of the double-stranded RNA; and
iv) the 3′ flanking polynucleotide;
wherein at least one of the 5′ flanking polynucleotide, the loop polynucleotide, and the 3′ flanking polynucleotide is heterologous to the first and/or the second strand of the double-stranded RNA; or
a2) the double-stranded RNA of any one of claims 1-89; and
b2) a microRNA scaffold comprising a 5′ flanking polynucleotide, a loop polynucleotide, and a 3′ flanking polynucleotide,
wherein the recombinant nucleic acid comprises:
i) the 5′ flanking polynucleotide;
ii) the second strand of the double-stranded RNA;
iii) the loop polynucleotide;
iv) the first strand of the double-stranded RNA; and
v) the 3′ flanking polynucleotide;
wherein at least one of the 5′ flanking polynucleotide, the loop polynucleotide, and the 3′ flanking polynucleotide is heterologous to the first and/or the second strand of the double-stranded RNA; or
a3) the double-stranded RNA of any one of claims 1-89; and
b3) a microRNA scaffold comprising a 5′ flanking polynucleotide and a 3′ flanking polynucleotide,
wherein the recombinant nucleic acid comprises:
i) the 5′ flanking polynucleotide;
ii) the first strand of the double-stranded RNA;
iii) the second strand of the double-stranded RNA; and
iv) the 3′ flanking polynucleotide;
wherein one or both of the 5′ flanking polynucleotide and the 3′ flanking polynucleotide is heterologous to the first and/or the second strand of the double-stranded RNA; or
a4) the double-stranded RNA of any one of claims 1-89; and
b4) a microRNA scaffold comprising a 5′ flanking polynucleotide and a 3′ flanking polynucleotide,
wherein the recombinant nucleic acid comprises:
i) the 5′ flanking polynucleotide;
ii) the second strand of the double-stranded RNA;
iii) the first strand of the double-stranded RNA; and
iv) the 3′ flanking polynucleotide;
wherein one or both of the 5′ flanking polynucleotide and the 3′ flanking polynucleotide is heterologous to the first and/or the second strand of the double-stranded RNA.

92. The recombinant nucleic acid of claim 91, wherein the recombinant nucleic acid comprises:
a) the 5′ flanking polynucleotide;
b) the first strand of the double-stranded RNA;
c) the loop polynucleotide;
d) the second strand of the double-stranded RNA; and
e) the 3′ flanking polynucleotide.

93. The recombinant nucleic acid of claim 91 or claim 92, wherein the 5′ flanking polynucleotide, the loop polynucleotide, and the 3′ flanking polynucleotide are derived from miR33.

94. The recombinant nucleic acid of claim 91, wherein the recombinant nucleic acid comprises:
a) the 5′ flanking polynucleotide;
b) the first strand of the double-stranded RNA;
c) the second strand of the double-stranded RNA; and
d) the 3′ flanking polynucleotide.

95. The recombinant nucleic acid of claim 91 or claim 94, wherein the 5′ flanking polynucleotide and the 3′ flanking polynucleotide are derived from miR451.

96. A DNA molecule comprising a nucleotide sequence encoding a recombinant nucleic acid according to any one of claims 91-95.

97. The DNA molecule of claim 96, wherein the 5′ flanking polynucleotide is encoded by the nucleotide sequence: tgcacacctcctggcgggcagctctg (SEQ ID NO:738).

98. The DNA molecule of claim 96 or claim 97, wherein the loop polynucleotide is encoded by the nucleotide sequence: tgttctggcaatacctg (SEQ ID NO:739).

99. The DNA molecule of any one of claims 96-98, wherein the 3′ flanking polynucleotide is encoded by the nucleotide sequence: gggaggcctgccctgactgcccac (SEQ ID NO:740).

100. The DNA molecule of any one of claims 96-99, comprising the nucleotide sequence set forth in any one of SEQ ID NOs:579-656.

101. The DNA molecule of claim 96, wherein the 5′ flanking polynucleotide is encoded by the nucleotide sequence acctactgactgccagggcacttgggaatggcaagg (SEQ ID NO:854).

102. The DNA molecule of claim 96 or claim 101, wherein the 3′ flanking polynucleotide is encoded by the nucleotide sequence tcttgctatacccagaaaacgtgccaggaagagaac (SEQ ID NO:855).

103. The DNA molecule of claim 96, wherein:
i) the 5′ flanking polynucleotide is encoded by the nucleotide sequence acctactgactgccagggcacttgggaatggcaagg (SEQ ID NO:854);
ii) the 3′ flanking polynucleotide is encoded by the nucleotide sequence tcttgctatacccagaaaacgtgccaggaagagaac (SEQ ID NO:855); and
iii) the first strand or the second strand is encoded by the nucleotide sequence set forth in any one of SEQ ID NOs:379-456.

104. The DNA molecule of claim 96, wherein the 5′ flanking polynucleotide is encoded by the nucleotide sequence set forth in SEQ ID NO:856.

105. The DNA molecule of claim 96 or claim 104, wherein the 3′ flanking polynucleotide is encoded by the nucleotide sequence set forth in SEQ ID NO:857.

106. The DNA molecule of claim 96, wherein:
i) the 5′ flanking polynucleotide is encoded by the nucleotide sequence set forth in SEQ ID NO:856;
ii) the 3′ flanking polynucleotide is encoded by the nucleotide sequence set forth in SEQ ID NO:857; and
iii) the first strand or the second strand is encoded by the nucleotide sequence set forth in any one of SEQ ID NOs:379-456.

107. The DNA molecule of claim 96, wherein the 5′ flanking polynucleotide is encoded by the nucleotide sequence set forth in SEQ ID NO:858.

108. The DNA molecule of claim 96 or claim 107, wherein the 3′ flanking polynucleotide is encoded by the nucleotide sequence set forth in SEQ ID NO:859.

109. The DNA molecule of claim 96, wherein:
i) the 5′ flanking polynucleotide is encoded by the nucleotide sequence set forth in SEQ ID NO:858;
ii) the 3′ flanking polynucleotide is encoded by the nucleotide sequence set forth in SEQ ID NO:859; and
iii) the first strand or the second strand is encoded by the nucleotide sequence set forth in any one of SEQ ID NOs:379-456.

110. A recombinant expression vector comprising the DNA molecule of any one of claims 96 to 109.

111. The recombinant expression vector of claim 110, wherein the nucleotide sequence is operably linked to a promoter that is functional in a eukaryotic cell.

112. The recombinant expression vector of claim 111, wherein the promoter is an RNA polymerase II promoter or an RNA polymerase III promoter.

113. The recombinant expression vector of claim 111 or claim 112, wherein the promoter is a CAG promoter, a CBA promoter, a CMV promoter, a U6 promoter, an EF1α promoter, or an H1 promoter.

114. The recombinant expression vector of any one of claims 110-113, wherein the recombinant expression vector comprises a 5′ adeno-associated virus (AAV) inverted terminal repeat (ITR) sequence and a 3′ AAV ITR sequence.

115. A recombinant expression vector comprising a nucleotide sequence encoding the recombinant nucleic acid of any one of claims 91-95.

116. The recombinant expression vector of claim 115, wherein the nucleotide sequence is operably linked to a promoter that is functional in a eukaryotic cell.

117. The recombinant expression vector of claim 116, wherein the promoter is an RNA polymerase II promoter or an RNA polymerase III promoter.

118. The recombinant expression vector of claim 116 or claim 117, wherein the promoter is a CAG promoter, a CBA promoter a CMV promoter, a U6 promoter, an EF1α promoter, or an H1 promoter.

119. The recombinant expression vector of any one of claims 115-118, wherein the recombinant expression vector comprises a 5′ adeno-associated virus (AAV) inverted terminal repeat (ITR) sequence and a 3′ AAV ITR sequence.

120. A delivery vehicle comprising the recombinant expression vector of any one of claims 110-119.

121. The delivery vehicle of claim 120, wherein the delivery vehicle a non-viral delivery vehicle.

122. The delivery vehicle of claim 121, wherein the delivery vehicle is a lipid nanoparticle.

123. The delivery vehicle of claim 120, wherein the delivery vehicle is a viral particle.

124. A viral particle comprising the recombinant expression vector of any one of claims 110-119.

125. The viral particle of claim 126, wherein the viral particle is an adeno-associated virus (AAV) particle.

126. The viral particle of claim 125, wherein the AAV particle comprises an AAV9 capsid.

127. The viral particle of claim 125, wherein the AAV particle comprises an AAV2 capsid.

128. A composition comprising:
a) the recombinant expression vector of any one of claims 110-119; and
b) a pharmaceutically acceptable excipient.

129. A composition comprising:
a) the delivery vehicle of any one of claims 120-123; and
b) a pharmaceutically acceptable excipient.

130. A composition comprising:
a) a viral particle comprising the recombinant expression vector of any one of claims 124-127; and
b) a pharmaceutically acceptable excipient.

131. A method for selectively reducing translation of a disease-associated CAG repeat-containing RNA in an individual having a CAG repeat expansion disorder, the method comprising administering to the individual an effective amount of the expression vector of any one of claims 110-119, delivery vehicle of any one of claims 120-123, the viral particle of any one of claims 124-127, or the pharmaceutical composition of any one of claims 128-130.

132. The method of claim 131, wherein the repeat expansion disorder is Huntington's disease, spinocerebellar ataxia type 1, spinocerebellar ataxia type 2, spinocerebellar ataxia type 3, spinocerebellar ataxia type 6, spinocerebellar ataxia type 7, spinocerebellar ataxia type 12, spinocerebellar ataxia type 17, spinal and bulbar muscular atrophy, dentatorubral pallidoluysian atrophy, or cleidocranial dysplasia.

133. The method of claim 131 or claim 132, wherein said administering comprises direct injection to the central nervous system of the individual.

134. The method of claim 133, wherein the direct injection is intracerebral ventricular injection, intraparenchymal injection, intrathecal injection, intrastriatal injection, intrathalamic injection, intracisternal magna injection, subpial injection, or any combination thereof.

135. The method of any one of claims 131-134, wherein said administering provides for a ratio of a polypeptide encoded by the non-disease-associated CAG repeat-containing RNA to a polypeptide encoded by disease-associated CAG repeat-containing RNA of greater than 1.0.

136. The method of any one of claims 131-134, wherein said administering provides for a ratio of a polypeptide encoded by non-disease-associated CAG repeat-containing RNA to a polypeptide encoded by disease-associated CAG repeat-containing RNA of from 1.1 to 1.8.

137. The method of any one of claims 131-134, wherein said administering provides for a ratio of a polypeptide encoded by non-disease-associated CAG repeat-containing RNA to a polypeptide encoded by disease-associated CAG repeat-containing RNA of greater than 1.8.

The application's sequence listing, which the Patent Office published only in electronic form, follows.

SEQUENCE LISTING (899 sequences)

SEQ ID NO: 1-6 - skipped (6 entries)

SEQ ID NO: 7 - RNA, 26 nt, synthetic construct
  source 1..26: mol_type = other RNA
tgcacacctcctggcgggcagctctg

SEQ ID NO: 8-11 - skipped (4 entries)

SEQ ID NO: 12 - DNA, 29 bp, synthetic construct
  source 1..29: mol_type = other DNA
ggaggcctgccctgactgcccactttttg

SEQ ID NO: 13 - RNA, 29 nt, synthetic construct
  source 1..29: mol_type = other RNA
ggaggcctgccctgactgcccactttttg

SEQ ID NO: 14-30 - skipped (17 entries)

SEQ ID NO: 31 - DNA, 15 bp, synthetic construct
  source 1..15: mol_type = other DNA
gtgaagccacagatg

SEQ ID NO: 32 - RNA, 15 nt, synthetic construct
  source 1..15: mol_type = other RNA
gtgaagccacagatg

SEQ ID NO: 33 - DNA, 15 bp, synthetic construct
  source 1..15: mol_type = other DNA
gttctggcaatacct

SEQ ID NO: 34 - RNA, 15 nt, synthetic construct
  source 1..15: mol_type = other RNA
gttctggcaatacct

SEQ ID NO: 35 - RNA, 21 nt, synthetic construct
  source 1..21: mol_type = other RNA
ctgctgcttctgctgctgctg

SEQ ID NO: 36 - RNA, 21 nt, synthetic construct
  source 1..21: mol_type = other RNA
tgctgctgttgctgctgctgc

SEQ ID NO: 37 - RNA, 21 nt, synthetic construct
  source 1..21: mol_type = other RNA
gctgctgcagctgctgctgct

SEQ ID NO: 38 - RNA, 21 nt, synthetic construct
  source 1..21: mol_type = other RNA
ctgctgcttatgctgctgctg

SEQ ID NO: 39 - RNA, 21 nt, synthetic construct
  source 1..21: mol_type = other RNA
tgctgctgtatctgctgctgc

SEQ ID NO: 40 - RNA, 21 nt, synthetic construct
  source 1..21: mol_type = other RNA
ctgctgcttctgatgctgctg

SEQ ID NO: 41 - RNA, 21 nt, synthetic construct
  source 1..21: mol_type = other RNA
ctgctgcttctgcggctgctg

SEQ ID NO: 42 - RNA, 21 nt, synthetic construct
  source 1..21: mol_type = other RNA
ctgctgctagtactgctgctg

SEQ ID NO: 43 - RNA, 21 nt, synthetic construct
  source 1..21: mol_type = other RNA
gctgctgcatatgctgctgct

SEQ ID NO: 44 - skipped

SEQ ID NO: 45 - RNA, 21 nt, synthetic construct
  source 1..21: mol_type = other RNA
ctgctgcttgcgctgctgctg

SEQ ID NO: 46 - RNA, 21 nt, synthetic construct
  source 1..21: mol_type = other RNA
ctgctgctagggctgctgctg

SEQ ID NO: 47 - skipped

SEQ ID NO: 48 - RNA, 21 nt, synthetic construct
  source 1..21: mol_type = other RNA
ctgctgctaaacctgctgctg

SEQ ID NO: 49 - RNA, 21 nt, synthetic construct
  source 1..21: mol_type = other RNA
ctgctgcttaaactgctgctg

SEQ ID NO: 50 - RNA, 21 nt, synthetic construct
  source 1..21: mol_type = other RNA
ctgctgcttaacctgctgctg

SEQ ID NO: 51 - DNA, 95 bp, synthetic construct
  source 1..95: mol_type = other DNA
gtggaaaggacgaaacaccggcagcagcagcagcagcagcagctcgagctgctgctgctgctgctgctgtttttgaattctcgacctcgagacaa

SEQ ID NO: 52 - DNA, 95 bp, synthetic construct
  source 1..95: mol_type = other DNA
gtggaaaggacgaaacaccggcagcagcagtttcagcagcagctcgagctgctgctgaaactgctgctgtttttgaattctcgacctcgagacaa

SEQ ID NO: 53 - DNA, 95 bp, synthetic construct
  source 1..95: mol_type = other DNA
gtggaaaggacgaaacaccggccgagaaatctcttacctcaactcgagttgaggtaagagatttctcggtttttgaattctcgacctcgagacaa

SEQ ID NO: 54 - DNA, 95 bp, synthetic construct
  source 1..95: mol_type = other DNA
gtggaaaggacgaaacaccgggaccgtgtgaatcattgtctactcgagtagacaatgattcacacggtctttttgaattctcgacctggtgacaa

SEQ ID NO: 55 - DNA, 95 bp, synthetic construct
  source 1..95: mol_type = other DNA
gtggaaaggacgaaacaccgggaggataactcggccataatactcgagtattatggccgagttatcctctttttgaattctcgacctggtgacaa

SEQ ID NO: 56 - DNA, 97 bp, synthetic construct
  source 1..97: mol_type = other DNA
gtggaaaggacgaaacaccgcagcagcagcagcagcagcagcacctgcgctgctgctgctgctgctgctgctttttgaattctcgacctggtgacaa

SEQ ID NO: 57 - DNA, 97 bp, synthetic construct
  source 1..97: mol_type = other DNA
gtggaaaggacgaaacaccgcagcagctctagcagcagcagcacctgcgctgctgctgctagagctgctgctttttgaattctcgacctggtgacaa

SEQ ID NO: 58 - DNA, 95 bp, synthetic construct
  source 1..95: mol_type = other DNA
gtggaaaggacgaaacacccagcagcacaagcagcagcagcctcgaggctgctgctgcaaatgctgctgtttttgaattctcgacctggtgacaa

SEQ ID NO: 59 - DNA, 106 bp, synthetic construct
  source 1..106: mol_type = other DNA
gtggaaaggacgaaacaccgcagcagccaaagcagcagcagcgtgaagccacagatggctgctgctgctaaagctgctgctttttgaattctcgacctggtgacaa

SEQ ID NO: 60 - DNA, 106 bp, synthetic construct
  source 1..106: mol_type = other DNA
gtggaaaggacgaaacaccgcagcagccaaagcagcagcagcgttctggcaatacctgctgctgctgctaaagctgctgctttttgaattctcgacctggtgacaa

SEQ ID NO: 61 - DNA, 95 bp, synthetic construct
  source 1..95: mol_type = other DNA
gtggaaaggacgaaacaccctgctgctaaagctgctgctgcctcgaggcagcagcagccaaagcagcagtttttgaattctcgacctggtgacaa

SEQ ID NO: 62 - DNA, 99 bp, synthetic construct
  source 1..99: mol_type = other DNA
gtggaaaggacgaaacaccgggaggataactcggccataatacgacctgcgctattatggccgagttatcctctttttgaattctcgacctggtgacaa

SEQ ID NO: 63 - DNA, 110 bp, synthetic construct
  source 1..110: mol_type = other DNA
gtggaaaggacgaaacagctgctgctgctaaagctgctgctgtgttctggcaatacctgcagcagcagccaaagcagcagcagatttttgaattctcgacctggtgacaa

SEQ ID NO: 64 - DNA, 109 bp, synthetic construct
  source 1..109: mol_type = other DNA
gtggaaaggacgaaacagctgctgctgctaaagctgctgctgtgttctggcaatacctgcagcagcagcttagcagcagcagatttttgaattctcgacctggtgacaa

SEQ ID NO: 65 - DNA, 154 bp, synthetic construct
  source 1..154: mol_type = other DNA
gtggaaaggacgaaacatgcacacctcctggcgggcagctctgctgctgctaaagctgctgctgtgttctggcaatacctgcagcagcagccaaagcagcagcagggaggcctgccctgactgcccactttttgaattctcgacctggtgacaa

SEQ ID NO: 66 - DNA, 154 bp, synthetic construct
  source 1..154: mol_type = other DNA
gtggaaaggacgaaacatgcacacctcctggcgggcagctctgctgctgctaaagctgctgctgtgttctggcaatacctgcagcagcacatctagcagcagcagggaggcctgccctgactgcccactttttgaattctcgacctggtgacaa

SEQ ID NO: 67 - DNA, 21 bp, synthetic construct
  source 1..21: mol_type = other DNA
  misc_feature 1..19: note = The sequences from position 1-19 are RNA nucleotides
  misc_feature 20..21: note = The sequences from position 20-21 are DNA nucleotides
tagacaatgattcacacggtt

SEQ ID NO: 68 - DNA, 21 bp, synthetic construct
  source 1..21: mol_type = other DNA
  misc_feature 1..19: note = The sequences from position 1-19 are RNA nucleotides
  misc_feature 20..21: note = The sequences from position 20-21 are DNA nucleotides
gctgctgctgctgctgctgtt

SEQ ID NO: 69 - DNA, 21 bp, synthetic construct
  source 1..21: mol_type = other DNA
  misc_feature 1..19: note = The sequences from position 1-19 are RNA nucleotides
  misc_feature 20..21: note = The sequences from position 20-21 are DNA nucleotides
gctgctgcagctgctgctgtt

SEQ ID NO: 70 - DNA, 21 bp, synthetic construct
  source 1..21: mol_type = other DNA
  misc_feature 1..19: note = The sequences from position 1-19 are RNA nucleotides
  misc_feature 20..21: note = The sequences from position 20-21 are DNA nucleotides
gctgctgcaaatgctgctgtt

SEQ ID NO: 71 - DNA, 21 bp, synthetic construct
  source 1..21: mol_type = other DNA
  misc_feature 1..19: note = The sequences from position 1-19 are RNA nucleotides
  misc_feature 20..21: note = The sequences from position 20-21 are DNA nucleotides
ccgtgtgaatcattgtctatt

SEQ ID NO: 72 - DNA, 21 bp, synthetic construct
  source 1..21: mol_type = other DNA
  misc_feature 1..19: note = The sequences from position 1-19 are RNA nucleotides
  misc_feature 20..21: note = The sequences from position 20-21 are DNA nucleotides
cagcagcagcagcagcagctt

SEQ ID NO: 73 - DNA, 21 bp, synthetic construct
  source 1..21: mol_type = other DNA
  misc_feature 1..19: note = The sequences from position 1-19 are RNA nucleotides
  misc_feature 20..21: note = The sequences from position 20-21 are DNA nucleotides
cagcagcagctgcagcagctt

SEQ ID NO: 74 - DNA, 21 bp, synthetic construct
  source 1..21: mol_type = other DNA
  misc_feature 1..19: note = The sequences from position 1-19 are RNA nucleotides
  misc_feature 20..21: note = The sequences from position 20-21 are DNA nucleotides
cagcagcatttgcagcagctt

SEQ ID NO: 75 - RNA, 21 nt, synthetic construct
  source 1..21: mol_type = other RNA
cagcagcagcataagcagcag

SEQ ID NO: 76 - RNA, 21 nt, synthetic construct
  source 1..21: mol_type = other RNA
ctgctgcttcggctgctgctg

SEQ ID NO: 77 - RNA, 21 nt, synthetic construct
  source 1..21: mol_type = other RNA
cagcagcatcaacagcagcga

SEQ ID NO: 78 - RNA, 21 nt, synthetic construct
  source 1..21: mol_type = other RNA
ctgctgctcctactgctgctg

SEQ ID NO: 79 - RNA, 21 nt, synthetic construct
  source 1..21: mol_type = other RNA
ctgctgctactggtgctgctg

SEQ ID NO: 80 - skipped

SEQ ID NO: 81 - RNA, 21 nt, synthetic construct
  source 1..21: mol_type = other RNA
ctgctgctactgcggctgctg

SEQ ID NO: 82 - RNA, 21 nt, synthetic construct
  source 1..21: mol_type = other RNA
ctgctgctcctgccgctgctg

SEQ ID NO: 83 - RNA, 21 nt, synthetic construct
  source 1..21: mol_type = other RNA
ctgctgcttctgccgctgctg

SEQ ID NO: 84 - skipped

SEQ ID NO: 85 - RNA, 21 nt, synthetic construct
  source 1..21: mol_type = other RNA
ctgctgctcctgctactgctg

SEQ ID NO: 86 - RNA, 21 nt, synthetic construct
  source 1..21: mol_type = other RNA
ctgctgctcctgctgatgctg

SEQ ID NO: 87 - RNA, 21 nt, synthetic construct
  source 1..21: mol_type = other RNA
ctgctgcttctgctggtgctg

SEQ ID NO: 88 - RNA, 21 nt, synthetic construct
  source 1..21: mol_type = other RNA
tgctgctgccgctgatgctgc

SEQ ID NO: 89 - RNA, 21 nt, synthetic construct
  source 1..21: mol_type = other RNA
tgctgctgcgtctgctgctgc

SEQ ID NO: 90 - RNA, 21 nt, synthetic construct
  source 1..21: mol_type = other RNA
tgctgctgcggatgctgctgc

SEQ ID NO: 91 - RNA, 21 nt, synthetic construct
  source 1..21: mol_type = other RNA
tgctgctgcggctgatgctgc

SEQ ID NO: 92 - RNA, 21 nt, synthetic construct
  source 1..21: mol_type = other RNA
tgctgctgctacggctgctgc

SEQ ID NO: 93 - RNA, 21 nt, synthetic construct
  source 1..21: mol_type = other RNA
tgctgctgctactgatgctgc

SEQ ID NO: 94 - RNA, 21 nt, synthetic construct
  source 1..21: mol_type = other RNA
tgctgctgctcgtgctgctgc

SEQ ID NO: 95 - RNA, 21 nt, synthetic construct
  source 1..21: mol_type = other RNA
tgctgctgctcctactgctgc

SEQ ID NO: 96 - RNA, 21 nt, synthetic construct
  source 1..21: mol_type = other RNA
tgctgctgcttatgctgctgc

SEQ ID NO: 97 - RNA, 21 nt, synthetic construct
  source 1..21: mol_type = other RNA
tgctgctgcttcggctgctgc

SEQ ID NO: 98 - RNA, 21 nt, synthetic construct
  source 1..21: mol_type = other RNA
tgctgctgcttctactgctgc

SEQ ID NO: 99 - RNA, 21 nt, synthetic construct
  source 1..21: mol_type = other RNA
tgctgctgcttctgcggctgc

SEQ ID NO: 100 - RNA, 21 nt, synthetic construct
  source 1..21: mol_type = other RNA
tgctgctcctgctactgctgc

SEQ ID NO: 101 - RNA, 21 nt, synthetic construct
  source 1..21: mol_type = other RNA
tgctgctcgtgctgctgctgc

SEQ ID NO: 102 - RNA, 21 nt, synthetic construct
  source 1..21: mol_type = other RNA
tgctgcttcggctgctgctgc

SEQ ID NO: 103 - RNA, 21 nt, synthetic construct
  source 1..21: mol_type = other RNA
tgctgcttctgatgctgctgc

SEQ ID NO: 104 - RNA, 21 nt, synthetic construct
  source 1..21: mol_type = other RNA
tgctgcttctgccgctgctgc

SEQ ID NO: 105 - RNA, 21 nt, synthetic construct
  source 1..21: mol_type = other RNA
tgctgcttctgcggctgctgc

SEQ ID NO: 106 - RNA, 21 nt, synthetic construct
  source 1..21: mol_type = other RNA
tgctgcttatgctgctgctgc

SEQ ID NO: 107 - RNA, 21 nt, synthetic construct
  source 1..21: mol_type = other RNA
tgctgctgattctgctgctgc

SEQ ID NO: 108 - RNA, 21 nt, synthetic construct
  source 1..21: mol_type = other RNA
tgctgctgatgctgccgctgc

SEQ ID NO: 109 - RNA, 21 nt, synthetic construct
  source 1..21: mol_type = other RNA
tgctgctgacgctgctgctgc

SEQ ID NO: 110 - RNA, 21 nt, synthetic construct
  source 1..21: mol_type = other RNA
gctgctgctactgatgctgct

SEQ ID NO: 111 - RNA, 21 nt, synthetic construct
  source 1..21: mol_type = other RNA
gctgctgctactggtgctgct

SEQ ID NO: 112 - RNA, 21 nt, synthetic construct
  source 1..21: mol_type = other RNA
gctgctgctcgtgctgctgct

SEQ ID NO: 113 - RNA, 21 nt, synthetic construct
  source 1..21: mol_type = other RNA
gctgctgctcctactgctgct

SEQ ID NO: 114 - RNA, 21 nt, synthetic construct
  source 1..21: mol_type = other RNA
gctgctgcttatgctgctgct

SEQ ID NO: 115 - RNA, 21 nt, synthetic construct
  source 1..21: mol_type = other RNA
gctgctgcttcggctgctgct

SEQ ID NO: 116 - RNA, 21 nt, synthetic construct
  source 1..21: mol_type = other RNA
gctgctgcttctgatgctgct

SEQ ID NO: 117 - RNA, 21 nt, synthetic construct
  source 1..21: mol_type = other RNA
gctgctgcttctgcggctgct

SEQ ID NO: 118 - RNA, 21 nt, synthetic construct
  source 1..21: mol_type = other RNA
gctgctgctgatactgctgct

SEQ ID NO: 119 - RNA, 21 nt, synthetic construct
  source 1..21: mol_type = other RNA
gctgctgctgatcctgctgct

SEQ ID NO: 120 - RNA, 21 nt, synthetic construct
  source 1..21: mol_type = other RNA
gctgctgctgattctgctgct

SEQ ID NO: 121 - RNA, 21 nt, synthetic construct
  source 1..21: mol_type = other RNA
gctgctgctgatgcagctgct

SEQ ID NO: 122 - RNA, 21 nt, synthetic construct
  source 1..21: mol_type = other RNA
gctgctgctgatgccgctgct

SEQ ID NO: 123 - RNA, 21 nt, synthetic construct
  source 1..21: mol_type = other RNA
gctgctgctgttgatgctgct

SEQ ID NO: 124 - RNA, 21 nt, synthetic construct
  source 1..21: mol_type = other RNA
gctgctgatggtgctgctgct

SEQ ID NO: 125 - RNA, 21 nt, synthetic construct
  source 1..21: mol_type = other RNA
gctgctgatgcggctgctgct

SEQ ID NO: 126 - RNA, 21 nt, synthetic construct
  source 1..21: mol_type = other RNA
gctgctgatgctgccgctgct

SEQ ID NO: 127 - RNA, 21 nt, synthetic construct
  source 1..21: mol_type = other RNA
gctgctgatgctgctcctgct

SEQ ID NO: 128 - RNA, 21 nt, synthetic construct
  source 1..21: mol_type = other RNA
gctgctggtgctgcttctgct

SEQ ID NO: 129 - RNA, 21 nt, synthetic construct
  source 1..21: mol_type = other RNA
gctgctgccgctgatgctgct

SEQ ID NO: 130 - RNA, 21 nt, synthetic construct
  source 1..21: mol_type = other RNA
gctgctgcggatgctgctgct

SEQ ID NO: 131 - RNA, 21 nt, synthetic construct
  source 1..21: mol_type = other RNA
gctgctgcggctgatgctgct

SEQ ID NO: 132 - RNA, 21 nt, synthetic construct
  source 1..21: mol_type = other RNA
ctgctgcttattctgctgctg

SEQ ID NO: 133 - RNA, 21 nt, synthetic construct
  source 1..21: mol_type = other RNA
ctgctgctcatgatgctgctg

SEQ ID NO: 134 - RNA, 21 nt, synthetic construct
  source 1..21: mol_type = other RNA
ctgctgctcgtgatgctgctg

SEQ ID NO: 135 - RNA, 21 nt, synthetic construct
  source 1..21: mol_type = other RNA
ctgctgctcgtggtgctgctg

SEQ ID NO: 136 - RNA, 21 nt, synthetic construct
  source 1..21: mol_type = other RNA
ctgctgcttatggtgctgctg

SEQ ID NO: 137 - RNA, 21 nt, synthetic construct
  source 1..21: mol_type = other RNA
ctgctgcttgtgatgctgctg

SEQ ID NO: 138 - RNA, 21 nt, synthetic construct
  source 1..21: mol_type = other RNA
ctgctgcttgtggtgctgctg

SEQ ID NO: 139 - RNA, 21 nt, synthetic construct
  source 1..21: mol_type = other RNA
ctgctgctagtgcggctgctg

SEQ ID NO: 140 - RNA, 21 nt, synthetic construct
  source 1..21: mol_type = other RNA
ctgctgctcgtgcagctgctg

SEQ ID NO: 141 - RNA, 21 nt, synthetic construct
  source 1..21: mol_type = other RNA
ctgctgctcgtgcggctgctg

SEQ ID NO: 142 - RNA, 21 nt, synthetic construct
  source 1..21: mol_type = other RNA
ctgctgcttatgccgctgctg

SEQ ID NO: 143 - RNA, 21 nt, synthetic construct
  source 1..21: mol_type = other RNA
ctgctgcttatgcggctgctg

SEQ ID NO: 144 - RNA, 21 nt, synthetic construct
  source 1..21: mol_type = other RNA
ctgctgctcatgcttctgctg

SEQ ID NO: 145 - RNA, 21 nt, synthetic construct
  source 1..21: mol_type = other RNA
ctgctgcttatgctactgctg

SEQ ID NO: 146 - RNA, 21 nt, synthetic construct
  source 1..21: mol_type = other RNA
ctgctgcttatgctcctgctg

SEQ ID NO: 147 - RNA, 21 nt, synthetic construct
  source 1..21: mol_type = other RNA
ctgctgctcgtgctgatgctg

SEQ ID NO: 148 - RNA, 21 nt, synthetic construct
  source 1..21: mol_type = other RNA
ctgctgctcgtgctggtgctg

SEQ ID NO: 149 - RNA, 21 nt, synthetic construct
  source 1..21: mol_type = other RNA
ctgctgcttatgctggtgctg

SEQ ID NO: 150 - RNA, 21 nt, synthetic construct
  source 1..21: mol_type = other RNA
ctgctgcttgtgctgatgctg

SEQ ID NO: 151 - skipped

SEQ ID NO: 152 - RNA, 21 nt, synthetic construct
  source 1..21: mol_type = other RNA
ctgctgctaacgctgctgctg

SEQ ID NO: 153 - skipped

SEQ ID NO: 154 - RNA, 21 nt, synthetic construct
  source 1..21: mol_type = other RNA
ctgctgctcacgctgctgctg

SEQ ID NO: 155 - RNA, 21 nt, synthetic construct
  source 1..21: mol_type = other RNA
ctgctgctcgcgctgctgctg

SEQ ID NO: 156 - RNA, 21 nt, synthetic construct
  source 1..21: mol_type = other RNA
ctgctgcttacgctgctgctg

SEQ ID NO: 157 - RNA, 21 nt, synthetic construct
  source 1..21: mol_type = other RNA
ctgctgcttaggctgctgctg

SEQ ID NO: 158 - skipped

SEQ ID NO: 159 - RNA, 21 nt, synthetic construct
  source 1..21: mol_type = other RNA
tgctgctgaagcttctgctgc

SEQ ID NO: 160 - RNA, 21 nt, synthetic construct
  source 1..21: mol_type = other RNA
tgctgctgacgatgctgctgc

SEQ ID NO: 161 - RNA, 21 nt, synthetic construct
  source 1..21: mol_type = other RNA
tgctgctgacggtgctgctgc

SEQ ID NO: 162 - RNA, 21 nt, synthetic construct
  source 1..21: mol_type = other RNA
tgctgctgacgcggctgctgc

SEQ ID NO: 163 - RNA, 21 nt, synthetic construct
  source 1..21: mol_type = other RNA
tgctgctgacgcttctgctgc

SEQ ID NO: 164 - RNA, 21 nt, synthetic construct
  source 1..21: mol_type = other RNA
tgctgctggcgctcctgctgc

SEQ ID NO: 165 - RNA, 21 nt, synthetic construct
  source 1..21: mol_type = other RNA
gctgctgcacctggtgctgct

SEQ ID NO: 166 - RNA, 21 nt, synthetic construct
  source 1..21: mol_type = other RNA
gctgctgcgactgatgctgct

SEQ ID NO: 167 - RNA, 21 nt, synthetic construct
  source 1..21: mol_type = other RNA
gctgctgcgactgcttctgct

SEQ ID NO: 168 - RNA, 21 nt, synthetic construct
  source 1..21: mol_type = other RNA
gctgctgcgcatgctgctgct

SEQ ID NO: 169 - RNA, 21 nt, synthetic construct
  source 1..21: mol_type = other RNA
gctgctgcgcgtgctgctgct

SEQ ID NO: 170 - RNA, 21 nt, synthetic construct
  source 1..21: mol_type = other RNA
gctgctgcgcctgatgctgct

SEQ ID NO: 171 - RNA, 21 nt, synthetic construct
  source 1..21: mol_type = other RNA
gctgctgcgcctggtgctgct

SEQ ID NO: 172 - RNA, 21 nt, synthetic construct
  source 1..21: mol_type = other RNA
gctgctgcgtatgctgctgct

SEQ ID NO: 173 - RNA, 21 nt, synthetic construct
  source 1..21: mol_type = other RNA
gctgctgcgtcttctgctgct

SEQ ID NO: 174 - RNA, 21 nt, synthetic construct
  source 1..21: mol_type = other RNA
gctgctgcgtctgatgctgct

SEQ ID NO: 175 - RNA, 21 nt, synthetic construct
  source 1..21: mol_type = other RNA
gctgctgcgtctggtgctgct

SEQ ID NO: 176 - RNA, 21 nt, synthetic construct
  source 1..21: mol_type = other RNA
gctgctgcgtctgcagctgct

SEQ ID NO: 177 - skipped

SEQ ID NO: 178 - RNA, 21 nt, synthetic construct
  source 1..21: mol_type = other RNA
ctgctgctagtccttctgctg

SEQ ID NO: 179 - RNA, 21 nt, synthetic construct
  source 1..21: mol_type = other RNA
ctgctgctcattctactgctg

SEQ ID NO: 180 - RNA, 21 nt, synthetic construct
  source 1..21: mol_type = other RNA
ctgctgctcgtactgatgctg

SEQ ID NO: 181 - RNA, 21 nt, synthetic construct
  source 1..21: mol_type = other RNA
ctgctgctcgttctggtgctg

SEQ ID NO: 182 - RNA, 21 nt, synthetic construct
  source 1..21: mol_type = other RNA
ctgctgctagtgatcctgctg

SEQ ID NO: 183 - RNA, 21 nt, synthetic construct
  source 1..21: mol_type = other RNA
ctgctgctagtggttctgctg

SEQ ID NO: 184 - RNA, 21 nt, synthetic construct
  source 1..21: mol_type = other RNA
ctgctgctaatgcgtctgctg

SEQ ID NO: 185 - RNA, 21 nt, synthetic construct
  source 1..21: mol_type = other RNA
ctgctgctcatgcgtctgctg

SEQ ID NO: 186 - RNA, 21 nt, synthetic construct
  source 1..21: mol_type = other RNA
ctgctgctcgtgcgcctgctg

SEQ ID NO: 187 - RNA, 21 nt, synthetic construct
  source 1..21: mol_type = other RNA
ctgctgctcgtgcgtctgctg

SEQ ID NO: 188 - RNA, 21 nt, synthetic construct
  source 1..21: mol_type = other RNA
ctgctgcttatgcgtctgctg

SEQ ID NO: 189 - RNA, 21 nt, synthetic construct
  source 1..21: mol_type = other RNA
ctgctgctaatgcggttgctg

SEQ ID NO: 190 - RNA, 21 nt, synthetic construct
  source 1..21: mol_type = other RNA
ctgctgctcgtgcagatgctg

SEQ ID NO: 191 - RNA, 21 nt, synthetic construct
  source 1..21: mol_type = other RNA
ctgctgctcgtgcggatgctg

SEQ ID NO: 192 - RNA, 21 nt, synthetic construct
  source 1..21: mol_type = other RNA
ctgctgctagtgcttatgctg

SEQ ID NO: 193 - RNA, 21 nt, synthetic construct
  source 1..21: mol_type = other RNA
ctgctgctcgtgctcatgctg

SEQ ID NO: 194 - RNA, 21 nt, synthetic construct
  source 1..21: mol_type = other RNA
ctgctgctcgtgcttatgctg

SEQ ID NO: 195 - RNA, 21 nt, synthetic construct
  source 1..21: mol_type = other RNA
ctgctgctaaggctcctgctg

SEQ ID NO: 196 - RNA, 21 nt, synthetic construct
  source 1..21: mol_type = other RNA
ctgctgcttaggctcctgctg

SEQ ID NO: 197 - RNA, 21 nt, synthetic construct
  source 1..21: mol_type = other RNA
ctgctgctaacgctgttgctg

SEQ ID NO: 198 - RNA, 21 nt, synthetic construct
  source 1..21: mol_type = other RNA
ctgctgctagcgctgttgctg

SEQ ID NO: 199 - RNA, 21 nt, synthetic construct
  source 1..21: mol_type = other RNA
ctgctgcttaggctgttgctg

SEQ ID NO: 200 - RNA, 21 nt, synthetic construct
  source 1..21: mol_type = other RNA
tgctgctgacgcttttgctgc

SEQ ID NO: 201 - RNA, 21 nt, synthetic construct
  source 1..21: mol_type = other RNA
tgctgctgacgcttcggctgc

SEQ ID NO: 202 - RNA, 21 nt, synthetic construct
  source 1..21: mol_type = other RNA
tgctgctggcgcttttgctgc

SEQ ID NO: 203 - RNA, 21 nt, synthetic construct
  source 1..21: mol_type = other RNA
tgctgctgtcgcttcggctgc

SEQ ID NO: 204 - RNA, 21 nt, synthetic construct
  source 1..21: mol_type = other RNA
gctgctgcatatactgctgct

SEQ ID NO: 205 - RNA, 21 nt, synthetic construct
  source 1..21: mol_type = other RNA
gctgctgcgcatgcttctgct

SEQ ID NO: 206 - RNA, 21 nt, synthetic construct
  source 1..21: mol_type = other RNA
gctgctgcgcgtgatgctgct

SEQ ID NO: 207 - RNA, 21 nt, synthetic construct
  source 1..21: mol_type = other RNA
gctgctgcgcgtgcttctgct

SEQ ID NO: 208 - RNA, 21 nt, synthetic construct
  source 1..21: mol_type = other RNA
gctgctgcgtatgccgctgct

SEQ ID NO: 209 - RNA, 21 nt, synthetic construct
  source 1..21: mol_type = other RNA
gctgctgcgtatgcttctgct

SEQ ID NO: 210 - RNA, 21 nt, synthetic construct
  source 1..21: mol_type = other RNA
ctgctgctaaagctaatgctg

SEQ ID NO: 211 - RNA, 21 nt, synthetic construct
  source 1..21: mol_type = other RNA
ctgctgctaaagctattgctg

SEQ ID NO: 212 - RNA, 21 nt, synthetic construct
  source 1..21: mol_type = other RNA
ctgctgctaaagcttatgctg

SEQ ID NO: 213 - RNA, 21 nt, synthetic construct
  source 1..21: mol_type = other RNA
ctgctgctaaagcttttgctg

SEQ ID NO: 214 - RNA, 21 nt, synthetic construct
  source 1..21: mol_type = other RNA
tgctgctgacgatgaagctgc

SEQ ID NO: 215 - RNA, 21 nt, synthetic construct
  source 1..21: mol_type = other RNA
tgctgctgacgatgtagctgc

SEQ ID NO: 216 - RNA, 21 nt, synthetic construct
  source 1..21: mol_type = other RNA
gctgctgcatatgcaactgct

SEQ ID NO: 217 - RNA, 21 nt, synthetic construct
  source 1..21: mol_type = other RNA
gctgctgcatatgcatctgct

SEQ ID NO: 218-219 - skipped (2 entries)

SEQ ID NO: 220 - RNA, 21 nt, synthetic construct
  source 1..21: mol_type = other RNA
ctgctgctcctgctgctgctg

SEQ ID NO: 221 - RNA, 21 nt, synthetic construct
  source 1..21: mol_type = other RNA
tgctgctgatgctgctgctgc

SEQ ID NO: 222 - RNA, 21 nt, synthetic construct
  source 1..21: mol_type = other RNA
tgctgctggtgctgctgctgc

SEQ ID NO: 223 - skipped

SEQ ID NO: 224 - RNA, 21 nt, synthetic construct
  source 1..21: mol_type = other RNA
gctgctgccgctgctgctgct

SEQ ID NO: 225 - RNA, 21 nt, synthetic construct
  source 1..21: mol_type = other RNA
gctgctgcggctgctgctgct

SEQ ID NO: 226 - skipped

SEQ ID NO: 227 - RNA, 13 nt, synthetic construct
  source 1..13: mol_type = other RNA
ggctgtggctgga

SEQ ID NO: 228 - RNA, 20 nt, synthetic construct
  source 1..20: mol_type = other RNA
gggggaaaaagggggaaaaa

SEQ ID NO: 229 - RNA, 16 nt, synthetic construct
  source 1..16: mol_type = other RNA
cttgggaatggcaagg

SEQ ID NO: 230 - RNA, 14 nt, synthetic construct
  source 1..14: mol_type = other RNA
ggctgagccgcagt

SEQ ID NO: 231-232 - skipped (2 entries)

SEQ ID NO: 233 - RNA, 12 nt, synthetic construct
  source 1..12: mol_type = other RNA
cccattggcata

SEQ ID NO: 234 - skipped

SEQ ID NO: 235 - RNA, 30 nt, synthetic construct
  source 1..30: mol_type = other RNA
aggaagcttctggagatcctgctccgtcgc

SEQ ID NO: 236 - skipped

SEQ ID NO: 237 - RNA, 15 nt, synthetic construct
  source 1..15: mol_type = other RNA
aaggccgtggcctcg

SEQ ID NO: 238 - RNA, 13 nt, synthetic construct
  source 1..13: mol_type = other RNA
ggctgcggctgga

SEQ ID NO: 239 - skipped

SEQ ID NO: 240 - RNA, 16 nt, synthetic construct
  source 1..16: mol_type = other RNA
cttgggaatggcgagg

SEQ ID NO: 241 - RNA, 18 nt, synthetic construct
  source 1..18: mol_type = other RNA
acctggctgagccgcagt

SEQ ID NO: 242 - skipped

SEQ ID NO: 243 - RNA, 17 nt, synthetic construct
  source 1..17: mol_type = other RNA
tgtaccaccttgtcgga

SEQ ID NO: 244-246 - skipped (3 entries)

SEQ ID NO: 247 - RNA, 30 nt, synthetic construct
  source 1..30: mol_type = other RNA
tggaagcttcaggagatcctgctccgtcgc

SEQ ID NO: 248 - skipped

SEQ ID NO: 249 - RNA, 29 nt, synthetic construct
  source 1..29: mol_type = other RNA
ctggaggcttgctttgggctgtattgctg

SEQ ID NO: 250 - skipped

SEQ ID NO: 251 - RNA, 11 nt, synthetic construct
  source 1..11: mol_type = other RNA
tggaggcagct

SEQ ID NO: 252 - skipped

SEQ ID NO: 253 - RNA, 16 nt, synthetic construct
  source 1..16: mol_type = other RNA
tcttgctatacccaga

SEQ ID NO: 254 - RNA, 11 nt, synthetic construct
  source 1..11: mol_type = other RNA
tgccctctgcc

SEQ ID NO: 255-256 - skipped (2 entries)

SEQ ID NO: 257 - RNA, 10 nt, synthetic construct
  source 1..10: mol_type = other RNA
tgtcagtgtg

SEQ ID NO: 258 - skipped

SEQ ID NO: 259 - RNA, 19 nt, synthetic construct
  source 1..19: mol_type = other RNA
gactgggcaagggagagca

SEQ ID NO: 260 - skipped

SEQ ID NO: 261 - RNA, 14 nt, synthetic construct
  source 1..14: mol_type = other RNA
gggacgcgggcctg

SEQ ID NO: 262 - RNA, 11 nt, synthetic construct
  source 1..11: mol_type = other RNA
tggaggcagcg

SEQ ID NO: 263 - skipped

SEQ ID NO: 264 - RNA, 16 nt, synthetic construct
  source 1..16: mol_type = other RNA
tcttgctgctcccaca

SEQ ID NO: 265 - RNA, 17 nt, synthetic construct
  source 1..17: mol_type = other RNA
tgccctctgcccctggc

SEQ ID NO: 266 - skipped

SEQ ID NO: 267 - RNA, 15 nt, synthetic construct
  source 1..15: mol_type = other RNA
tgacattttggtatc

SEQ ID NO: 268-270 - skipped (3 entries)

SEQ ID NO: 271 - RNA, 17 nt, synthetic construct
  source 1..17: mol_type = other RNA
gactgggcaagggccag

SEQ ID NO: 272 - skipped

SEQ ID NO: 273 - RNA, 67 nt, synthetic construct
  source 1..67: mol_type = other RNA
caggaaggacacaaggccctttatcagcactcacatggaacaaatggccaccgtgggaggatgacaa

SEQ ID NO: 274 - RNA, 17 nt, synthetic construct
  source 1..17: mol_type = other RNA
gtgcaggtcccaatggg

SEQ ID NO: 275 - RNA, 16 nt, synthetic construct
  source 1..16: mol_type = other RNA
gtttccatctgtgagg

SEQ ID NO: 276 - RNA, 19 nt, synthetic construct
  source 1..19: mol_type = other RNA
tgttctggtggtacccatg

SEQ ID NO: 277 - RNA, 16 nt, synthetic construct
  source 1..16: mol_type = other RNA
tgtcctgacccagcta

SEQ ID NO: 278 - RNA, 12 nt, synthetic construct
  source 1..12: mol_type = other RNA
ggacctgagcgt

SEQ ID NO: 279 - RNA, 16 nt, synthetic construct
  source 1..16: mol_type = other RNA
ctgttgaatctcatgg

SEQ ID NO: 280 - RNA, 15 nt, synthetic construct
  source 1..15: mol_type = other RNA
gtgaagtggaccgca

SEQ ID NO: 281 - RNA, 18 nt, synthetic construct
  source 1..18: mol_type = other RNA
aggaggctctcaatgtgt

SEQ ID NO: 282 - RNA, 16 nt, synthetic construct
  source 1..16: mol_type = other RNA
aggacaatgccgttgt

SEQ ID NO: 283 - RNA, 19 nt, synthetic construct
  source 1..19: mol_type = other RNA
ctgtgaagccacagatggg

SEQ ID NO: 284 - RNA, 17 nt, synthetic construct
  source 1..17: mol_type = other RNA
gtgcaggtcccaagggg

SEQ ID NO: 285 - RNA, 16 nt, synthetic construct
  source 1..16: mol_type = other RNA
gtgtccgtccatgagg

SEQ ID NO: 286 - RNA, 19 nt, synthetic construct
  source 1..19: mol_type = other RNA
tgttctggcaatacctgtg

SEQ ID NO: 287 - RNA, 13 nt, synthetic construct
  source 1..13: mol_type = other RNA
cggacctgagcgt

SEQ ID NO: 288 - skipped

SEQ ID NO: 289 - RNA, 14 nt, synthetic construct
  source 1..14: mol_type = other RNA
gtgaagtggaccgc

SEQ ID NO: 290 - RNA, 16 nt, synthetic construct
  source 1..16: mol_type = other RNA
gggccttcgccgcaca

SEQ ID NO: 291 - RNA, 17 nt, synthetic construct
  source 1..17: mol_type = other RNA
aggaggctgggacatgt

SEQ ID NO: 292 - skipped

SEQ ID NO: 293 - RNA, 19 nt, synthetic construct
  source 1..19: mol_type = other RNA
ctgtgaagccacaaatggg

SEQ ID NO: 294 - RNA, 17 nt, synthetic construct
  source 1..17: mol_type = other RNA
ttttggcctctgactga

SEQ ID NO: 295 - RNA, 21 nt, synthetic construct
  source 1..21: mol_type = other RNA
ctgctgctactgctgctgctg

SEQ ID NO: 296 - RNA, 21 nt, synthetic construct
  source 1..21: mol_type = other RNA
ctgctgctgatgctgctgctg

SEQ ID NO: 297 - RNA, 21 nt, synthetic construct
  source 1..21: mol_type = other RNA
ctgctgctgcagctgctgctg

SEQ ID NO: 298 - RNA, 21 nt, synthetic construct
  source 1..21: mol_type = other RNA
ctgctgctaatgctgctgctg

SEQ ID NO: 299 - RNA, 21 nt, synthetic construct
  source 1..21: mol_type = other RNA
ctgctgctacagctgctgctg

SEQ ID NO: 300 - RNA, 21 nt, synthetic construct
  source 1..21: mol_type = other RNA
ctgctgctactactgctgctg

SEQ ID NO: 301 - RNA, 21 nt, synthetic construct
  source 1..21: mol_type = other RNA
ctgctgctactgatgctgctg

SEQ ID NO: 302 - RNA, 21 nt, synthetic construct
  source 1..21: mol_type = other RNA
ctgctgctactgcagctgctg

SEQ ID NO: 303 - RNA, 21 nt, synthetic construct
  source 1..21: mol_type = other RNA
ctgctgctactgctactgctg

SEQ ID NO: 304 - RNA, 21 nt, synthetic construct
  source 1..21: mol_type = other RNA
ctgctgctactgctgatgctg

SEQ ID NO: 305 - RNA, 21 nt, synthetic construct
  source 1..21: mol_type = other RNA
ctgctgctgaagctgctgctg

SEQ ID NO: 306 - RNA, 21 nt, synthetic construct
  source 1..21: mol_type = other RNA
ctgctgctgatactgctgctg

SEQ ID NO: 307 - RNA, 21 nt, synthetic construct
  source 1..21: mol_type = other RNA
ctgctgctgatgatgctgctg

SEQ ID NO: 308 - RNA, 21 nt, synthetic construct
  source 1..21: mol_type = other RNA
ctgctgctgatgcagctgctg

SEQ ID NO: 309 - RNA, 21 nt, synthetic construct
  source 1..21: mol_type = other RNA
ctgctgctgatgctactgctg

SEQ ID NO: 310 - RNA, 21 nt, synthetic construct
  source 1..21: mol_type = other RNA
ctgctgctgatgctgatgctg

SEQ ID NO: 311 - RNA, 21 nt, synthetic construct
  source 1..21: mol_type = other RNA
ctgctgctgcaactgctgctg

SEQ ID NO: 312 - RNA, 21 nt, synthetic construct
  source 1..21: mol_type = other RNA
ctgctgctgcagatgctgctg

SEQ ID NO: 313 - RNA, 21 nt, synthetic construct
  source 1..21: mol_type = other RNA
ctgctgctgcagcagctgctg

SEQ ID NO: 314 - RNA, 21 nt, synthetic construct
  source 1..21: mol_type = other RNA
ctgctgctgcagctactgctg

SEQ ID NO: 315 - RNA, 21 nt, synthetic construct
  source 1..21: mol_type = other RNA
ctgctgctgcagctgatgctg

SEQ ID NO: 316 - RNA, 21 nt, synthetic construct
  source 1..21: mol_type = other RNA
ctgctgcagctgctgctgctg

SEQ ID NO: 317 - RNA, 21 nt, synthetic construct
  source 1..21: mol_type = other RNA
ctgctgcaactgctgctgctg

SEQ ID NO: 318 - RNA, 21 nt, synthetic construct
  source 1..21: mol_type = other RNA
ctgctgcagatgctgctgctg

SEQ ID NO: 319 - RNA, 21 nt, synthetic construct
  source 1..21: mol_type = other RNA
ctgctgcagcagctgctgctg

SEQ ID NO: 320 - RNA, 21 nt, synthetic construct
  source 1..21: mol_type = other RNA
ctgctgcagctactgctgctg

SEQ ID NO: 321 - RNA, 21 nt, synthetic construct
  source 1..21: mol_type = other RNA
ctgctgcagctgatgctgctg

SEQ ID NO: 322 - RNA, 21 nt, synthetic construct
  source 1..21: mol_type = other RNA
ctgctgcagctgcagctgctg

SEQ ID NO: 323 - RNA, 21 nt, synthetic construct
  source 1..21: mol_type = other RNA
ctgctgcagctgctactgctg

SEQ ID NO: 324 - RNA, 21 nt, synthetic construct
  source 1..21: mol_type = other RNA
ctgctgcagctgctgatgctg

SEQ ID NO: 325 - RNA, 21 nt, synthetic construct
  source 1..21: mol_type = other RNA
ctgctgctaaagctgctgctg

SEQ ID NO: 326 - RNA, 21 nt, synthetic construct
  source 1..21: mol_type = other RNA
ctgctgctaatactgctgctg

SEQ ID NO: 327 - RNA, 21 nt, synthetic construct
  source 1..21: mol_type = other RNA
ctgctgctaatgatgctgctg

SEQ ID NO: 328 - RNA, 21 nt, synthetic construct
  source 1..21: mol_type = other RNA
ctgctgctaatgcagctgctg

SEQ ID NO: 329 - RNA, 21 nt, synthetic construct
  source 1..21: mol_type = other RNA
ctgctgctaatgctactgctg

SEQ ID NO: 330 - RNA, 21 nt, synthetic construct
  source 1..21: mol_type = other RNA
ctgctgctacagatgctgctg

SEQ ID NO: 331 - RNA, 21 nt, synthetic construct
  source 1..21: mol_type = other RNA
ctgctgctacagcagctgctg

SEQ ID NO: 332 - RNA, 21 nt, synthetic construct
  source 1..21: mol_type = other RNA
ctgctgctacagctgatgctg

SEQ ID NO: 333 - RNA, 21 nt, synthetic construct
  source 1..21: mol_type = other RNA
ctgctgctgaagatgctgctg

SEQ ID NO: 334 - RNA, 21 nt, synthetic construct
  source 1..21: mol_type = other RNA
ctgctgctgaagcagctgctg

SEQ ID NO: 335 - RNA, 21 nt, synthetic construct
  source 1..21: mol_type = other RNA
ctgctgctgaagctactgctg

SEQ ID NO: 336 - RNA, 21 nt, synthetic construct
  source 1..21: mol_type = other RNA
ctgctgctaatgctgatgctg

SEQ ID NO: 337 - RNA, 21 nt, synthetic construct
  source 1..21: mol_type = other RNA
ctgctgctacaactgctgctg

SEQ ID NO: 338 - RNA, 21 nt, synthetic construct
  source 1..21: mol_type = other RNA
ctgctgctacagctactgctg

SEQ ID NO: 339 - RNA, 21 nt, synthetic construct
  source 1..21: mol_type = other RNA
ctgctgctgaaactgctgctg

SEQ ID NO: 340 - RNA, 21 nt, synthetic construct
  source 1..21: mol_type = other RNA
ctgctgctgaagctgatgctg

SEQ ID NO: 341 - RNA, 21 nt, synthetic construct
  source 1..21: mol_type = other RNA
ctgctgctaaagatgctgctg

SEQ ID NO: 342 - RNA, 21 nt, synthetic construct
  source 1..21: mol_type = other RNA
ctgctgctacagaagctgctg

SEQ ID NO: 343 - RNA, 21 nt, synthetic construct
  source 1..21: mol_type = other RNA
ctgctgctacagatgatgctg

SEQ ID NO: 344 - RNA, 21 nt, synthetic construct
  source 1..21: mol_type = other RNA
ctgctgctacagcagatgctg

SEQ ID NO: 345 - RNA, 21 nt, synthetic construct
  source 1..21: mol_type = other RNA
ctgctgctgaagatactgctg

SEQ ID NO: 346 - RNA, 21 nt, synthetic construct
  source 1..21: mol_type = other RNA
ctgctgctgaagcaactgctg

SEQ ID NO: 347 - RNA, 21 nt, synthetic construct
  source 1..21: mol_type = other RNA
ctgctgctaaaactgctgctg

SEQ ID NO: 348 - RNA, 21 nt, synthetic construct
  source 1..21: mol_type = other RNA
ctgctgctaaagcagctgctg

SEQ ID NO: 349 - RNA, 21 nt, synthetic construct
  source 1..21: mol_type = other RNA
ctgctgctaaagctactgctg

SEQ ID NO: 350 - RNA, 21 nt, synthetic construct
  source 1..21: mol_type = other RNA
ctgctgctaaagctgatgctg

SEQ ID NO: 351 - RNA, 21 nt, synthetic construct
  source 1..21: mol_type = other RNA
ctgctgctaataatgctgctg

SEQ ID NO: 352 - RNA, 21 nt, synthetic construct
  source 1..21: mol_type = other RNA
ctgctgctaatacagctgctg

SEQ ID NO: 353 - RNA, 21 nt, synthetic construct
  source 1..21: mol_type = other RNA
ctgctgctaatactactgctg

SEQ ID NO: 354 - RNA, 21 nt, synthetic construct
  source 1..21: mol_type = other RNA
ctgctgctaatactgatgctg

SEQ ID NO: 355 - RNA, 21 nt, synthetic construct
  source 1..21: mol_type = other RNA
ctgctgctaatgaagctgctg

SEQ ID NO: 356 - RNA, 21 nt, synthetic construct
  source 1..21: mol_type = other RNA
ctgctgctaatgatactgctg

SEQ ID NO: 357 - RNA, 21 nt, synthetic construct
  source 1..21: mol_type = other RNA
ctgctgctaatgatgatgctg

SEQ ID NO: 358 - RNA, 21 nt, synthetic construct
  source 1..21: mol_type = other RNA
ctgctgctaatgcaactgctg

SEQ ID NO: 359 - RNA, 21 nt, synthetic construct
  source 1..21: mol_type = other RNA
ctgctgctaatgcagatgctg

SEQ ID NO: 360 - RNA, 21 nt, synthetic construct
  source 1..21: mol_type = other RNA
ctgctgctaatgctaatgctg

SEQ ID NO: 361 - RNA, 21 nt, synthetic construct
  source 1..21: mol_type = other RNA
ctgctgctacaaatgctgctg

SEQ ID NO: 362 - RNA, 21 nt, synthetic construct
  source 1..21: mol_type = other RNA
ctgctgctacaacagctgctg

SEQ ID NO: 363 - RNA, 21 nt, synthetic construct
  source 1..21: mol_type = other RNA
ctgctgctacaactactgctg

SEQ ID NO: 364 - RNA, 21 nt, synthetic construct
  source 1..21: mol_type = other RNA
ctgctgctacaactgatgctg

SEQ ID NO: 365 - RNA, 21 nt, synthetic construct
  source 1..21: mol_type = other RNA
ctgctgctacagatactgctg

SEQ ID NO: 366 - RNA, 21 nt, synthetic construct
  source 1..21: mol_type = other RNA
ctgctgctacagcaactgctg

SEQ ID NO: 367 - RNA, 21 nt, synthetic construct
  source 1..21: mol_type = other RNA
ctgctgctacagctaatgctg

SEQ ID NO: 368 - RNA, 21 nt, synthetic construct
  source 1..21: mol_type = other RNA
ctgctgctgaaaatgctgctg

SEQ ID NO: 369 - RNA, 21 nt, synthetic construct
  source 1..21: mol_type = other RNA
ctgctgctgaaacagctgctg

SEQ ID NO: 370 - RNA, 21 nt, synthetic construct
  source 1..21: mol_type = other RNA
ctgctgctgaaactactgctg

SEQ ID NO: 371 - RNA, 21 nt, synthetic construct
  source 1..21: mol_type = other RNA
ctgctgctgaaactgatgctg

SEQ ID NO: 372 - RNA, 21 nt, synthetic construct
  source 1..21: mol_type = other RNA
ctgctgctgaagaagctgctg

SEQ ID NO: 373 - RNA, 21 nt, synthetic construct
  source 1..21: mol_type = other RNA
ctgctgctgaagatgatgctg

SEQ ID NO: 374 - RNA, 21 nt, synthetic construct
  source 1..21: mol_type = other RNA
ctgctgctgaagcagatgctg

SEQ ID NO: 375 - RNA, 21 nt, synthetic construct
  source 1..21: mol_type = other RNA
ctgctgctgaagctaatgctg

SEQ ID NO: 376 - DNA, 21 bp, synthetic construct
  source 1..21: mol_type = other DNA
ctgctgctactgctgctgctg

SEQ ID NO: 377 - DNA, 21 bp, synthetic construct
  source 1..21: mol_type = other DNA
ctgctgctgatgctgctgctg

SEQ ID NO: 378 - DNA, 21 bp, synthetic construct
  source 1..21: mol_type = other DNA
ctgctgctgcagctgctgctg

SEQ ID NO: 379 - DNA, 21 bp, synthetic construct
  source 1..21: mol_type = other DNA
ctgctgctaatgctgctgctg

SEQ ID NO: 380 - DNA, 21 bp, synthetic construct
  source 1..21: mol_type = other DNA
ctgctgctacagctgctgctg

SEQ ID NO: 381 - DNA, 21 bp, synthetic construct
  source 1..21: mol_type = other DNA
ctgctgctactactgctgctg

SEQ ID NO: 382 - DNA, 21 bp, synthetic construct
  source 1..21: mol_type = other DNA
ctgctgctactgatgctgctg

SEQ ID NO: 383 - DNA, 21 bp, synthetic construct
  source 1..21: mol_type = other DNA
ctgctgctactgcagctgctg

SEQ ID NO: 384 - DNA, 21 bp, synthetic construct
  source 1..21: mol_type = other DNA
ctgctgctactgctactgctg

SEQ ID NO: 385 - DNA, 21 bp, synthetic construct
  source 1..21: mol_type = other DNA
ctgctgctactgctgatgctg

SEQ ID NO: 386 - DNA, 21 bp, synthetic construct
  source 1..21: mol_type = other DNA
ctgctgctgaagctgctgctg

SEQ ID NO: 387 - DNA, 21 bp, synthetic construct
  source 1..21: mol_type = other DNA
ctgctgctgatactgctgctg

SEQ ID NO: 388 - DNA, 21 bp, synthetic construct
  source 1..21: mol_type = other DNA
ctgctgctgatgatgctgctg

SEQ ID NO: 389 - DNA, 21 bp, synthetic construct
  source 1..21: mol_type = other DNA
ctgctgctgatgcagctgctg

SEQ ID NO: 390 - DNA, 21 bp, synthetic construct
  source 1..21: mol_type = other DNA
ctgctgctgatgctactgctg

SEQ ID NO: 391 - DNA, 21 bp, synthetic construct
  source 1..21: mol_type = other DNA
ctgctgctgatgctgatgctg

SEQ ID NO: 392 - DNA, 21 bp, synthetic construct
  source 1..21: mol_type = other DNA
ctgctgctgcaactgctgctg

SEQ ID NO: 393 - DNA, 21 bp, synthetic construct
  source 1..21: mol_type = other DNA
ctgctgctgcagatgctgctg

SEQ ID NO: 394 - DNA, 21 bp, synthetic construct
  source 1..21: mol_type = other DNA
ctgctgctgcagcagctgctg

SEQ ID NO: 395 - DNA, 21 bp, synthetic construct
  source 1..21: mol_type = other DNA
ctgctgctgcagctactgctg

SEQ ID NO: 396 - DNA, 21 bp, synthetic construct
  source 1..21: mol_type = other DNA
ctgctgctgcagctgatgctg

SEQ ID NO: 397 - DNA, 21 bp, synthetic construct
  source 1..21: mol_type = other DNA
ctgctgcagctgctgctgctg

SEQ ID NO: 398 - DNA, 21 bp, synthetic construct
  source 1..21: mol_type = other DNA
ctgctgcaactgctgctgctg

SEQ ID NO: 399 - DNA, 21 bp, synthetic construct
  source 1..21: mol_type = other DNA
ctgctgcagatgctgctgctg

SEQ ID NO: 400 - DNA, 21 bp, synthetic construct
  source 1..21: mol_type = other DNA
ctgctgcagcagctgctgctg

SEQ ID NO: 401 - DNA, 21 bp, synthetic construct
  source 1..21: mol_type = other DNA
ctgctgcagctactgctgctg

SEQ ID NO: 402 - DNA, 21 bp, synthetic construct
  source 1..21: mol_type = other DNA
ctgctgcagctgatgctgctg

SEQ ID NO: 403 - DNA, 21 bp, synthetic construct
  source 1..21: mol_type = other DNA
ctgctgcagctgcagctgctg

SEQ ID NO: 404 - DNA, 21 bp, synthetic construct
  source 1..21: mol_type = other DNA
ctgctgcagctgctactgctg

SEQ ID NO: 405 - DNA, 21 bp, synthetic construct
  source 1..21: mol_type = other DNA
ctgctgcagctgctgatgctg

SEQ ID NO: 406 - DNA, 21 bp, synthetic construct
  source 1..21: mol_type = other DNA
ctgctgctaaagctgctgctg

SEQ ID NO: 407 - DNA, 21 bp, synthetic construct
  source 1..21: mol_type = other DNA
ctgctgctaatactgctgctg

SEQ ID NO: 408 - DNA, 21 bp, synthetic construct
  source 1..21: mol_type = other DNA
ctgctgctaatgatgctgctg

SEQ ID NO: 409 - DNA, 21 bp, synthetic construct
  source 1..21: mol_type = other DNA
ctgctgctaatgcagctgctg

SEQ ID NO: 410 - DNA, 21 bp, synthetic construct
  source 1..21: mol_type = other DNA
ctgctgctaatgctactgctg

SEQ ID NO: 411 - DNA, 21 bp, synthetic construct
  source 1..21: mol_type = other DNA
ctgctgctacagatgctgctg

SEQ ID NO: 412 - DNA, 21 bp, synthetic construct
  source 1..21: mol_type = other DNA
ctgctgctacagcagctgctg

SEQ ID NO: 413 - DNA, 21 bp, synthetic construct
  source 1..21: mol_type = other DNA
ctgctgctacagctgatgctg

SEQ ID NO: 414 - DNA, 21 bp, synthetic construct
  source 1..21: mol_type = other DNA
ctgctgctgaagatgctgctg

SEQ ID NO: 415 - DNA, 21 bp, synthetic construct
  source 1..21: mol_type = other DNA
ctgctgctgaagcagctgctg

SEQ ID NO: 416 - DNA, 21 bp, synthetic construct
  source 1..21: mol_type = other DNA
ctgctgctgaagctactgctg

SEQ ID NO: 417 - DNA, 21 bp, synthetic construct
  source 1..21: mol_type = other DNA
ctgctgctaatgctgatgctg

SEQ ID NO: 418 - DNA, 21 bp, synthetic construct
  source 1..21: mol_type = other DNA
ctgctgctacaactgctgctg

SEQ ID NO: 419 - DNA, 21 bp, synthetic construct
  source 1..21: mol_type = other DNA
ctgctgctacagctactgctg

SEQ ID NO: 420 - DNA, 21 bp, synthetic construct
  source 1..21: mol_type = other DNA
ctgctgctgaaactgctgctg

SEQ ID NO: 421 - DNA, 21 bp, synthetic construct
  source 1..21: mol_type = other DNA
ctgctgctgaagctgatgctg

SEQ ID NO: 422 - DNA, 21 bp, synthetic construct
  source 1..21: mol_type = other DNA
ctgctgctaaagatgctgctg

SEQ ID NO: 423 - DNA, 21 bp, synthetic construct
  source 1..21: mol_type = other DNA
ctgctgctacagaagctgctg

SEQ ID NO: 424 - DNA, 21 bp, synthetic construct
  source 1..21: mol_type = other DNA
ctgctgctacagatgatgctg

SEQ ID NO: 425 - DNA, 21 bp, synthetic construct
  source 1..21: mol_type = other DNA
ctgctgctacagcagatgctg

SEQ ID NO: 426 - DNA, 21 bp, synthetic construct
  source 1..21: mol_type = other DNA
ctgctgctgaagatactgctg

SEQ ID NO: 427 - DNA, 21 bp, synthetic construct
  source 1..21: mol_type = other DNA
ctgctgctgaagcaactgctg

SEQ ID NO: 428 - DNA, 21 bp, synthetic construct
  source 1..21: mol_type = other DNA
ctgctgctaaaactgctgctg

SEQ ID NO: 429 - DNA, 21 bp, synthetic construct
  source 1..21: mol_type = other DNA
ctgctgctaaagcagctgctg

SEQ ID NO: 430 - DNA, 21 bp, synthetic construct
  source 1..21: mol_type = other DNA
ctgctgctaaagctactgctg

SEQ ID NO: 431 - DNA, 21 bp, synthetic construct
  source 1..21: mol_type = other DNA
ctgctgctaaagctgatgctg

SEQ ID NO: 432 - DNA, 21 bp, synthetic construct
  source 1..21: mol_type = other DNA
ctgctgctaataatgctgctg

SEQ ID NO: 433 - DNA, 21 bp, synthetic construct
  source 1..21: mol_type = other DNA
ctgctgctaatacagctgctg

SEQ ID NO: 434 - DNA, 21 bp, synthetic construct
  source 1..21: mol_type = other DNA
ctgctgctaatactactgctg

SEQ ID NO: 435 - DNA, 21 bp, synthetic construct
  source 1..21: mol_type = other DNA
ctgctgctaatactgatgctg

SEQ ID NO: 436 - DNA, 21 bp, synthetic construct
  source 1..21: mol_type = other DNA
ctgctgctaatgaagctgctg

SEQ ID NO: 437 - DNA, 21 bp, synthetic construct
  source 1..21: mol_type = other DNA
ctgctgctaatgatactgctg

SEQ ID NO: 438 - DNA, 21 bp, synthetic construct
  source 1..21: mol_type = other DNA
ctgctgctaatgatgatgctg

SEQ ID NO: 439 - DNA, 21 bp, synthetic construct
  source 1..21: mol_type = other DNA
ctgctgctaatgcaactgctg

SEQ ID NO: 440 - DNA, 21 bp, synthetic construct
  source 1..21: mol_type = other DNA
ctgctgctaatgcagatgctg

SEQ ID NO: 441 - DNA, 21 bp, synthetic construct
  source 1..21: mol_type = other DNA
ctgctgctaatgctaatgctg

SEQ ID NO: 442 - DNA, 21 bp, synthetic construct
  source 1..21: mol_type = other DNA
ctgctgctacaaatgctgctg

SEQ ID NO: 443 - DNA, 21 bp, synthetic construct
  source 1..21: mol_type = other DNA
ctgctgctacaacagctgctg

SEQ ID NO: 444 - DNA, 21 bp, synthetic construct
  source 1..21: mol_type = other DNA
ctgctgctacaactactgctg

SEQ ID NO: 445 - DNA, 21 bp, synthetic construct
  source 1..21: mol_type = other DNA
ctgctgctacaactgatgctg

SEQ ID NO: 446 - DNA, 21 bp, synthetic construct
  source 1..21: mol_type = other DNA
ctgctgctacagatactgctg

SEQ ID NO: 447 - DNA, 21 bp, synthetic construct
  source 1..21: mol_type = other DNA
ctgctgctacagcaactgctg

SEQ ID NO: 448 - DNA, 21 bp, synthetic construct
  source 1..21: mol_type = other DNA
ctgctgctacagctaatgctg

SEQ ID NO: 449 - DNA, 21 bp, synthetic construct
  source 1..21: mol_type = other DNA
ctgctgctgaaaatgctgctg

SEQ ID NO: 450 - DNA, 21 bp, synthetic construct
  source 1..21: mol_type = other DNA
ctgctgctgaaacagctgctg

SEQ ID NO: 451 - DNA, 21 bp, synthetic construct
  source 1..21: mol_type = other DNA
ctgctgctgaaactactgctg

SEQ ID NO: 452 - DNA, 21 bp, synthetic construct
  source 1..21: mol_type = other DNA
ctgctgctgaaactgatgctg

SEQ ID NO: 453 - DNA, 21 bp, synthetic construct
  source 1..21: mol_type = other DNA
ctgctgctgaagaagctgctg

SEQ ID NO: 454 - DNA, 21 bp, synthetic construct
  source 1..21: mol_type = other DNA
ctgctgctgaagatgatgctg

SEQ ID NO: 455 - DNA, 21 bp, synthetic construct
  source 1..21: mol_type = other DNA
ctgctgctgaagcagatgctg

SEQ ID NO: 456 - DNA, 21 bp, synthetic construct
  source 1..21: mol_type = other DNA
ctgctgctgaagctaatgctg

SEQ ID NO: 457 - DNA, 21 bp, synthetic construct
  source 1..21: mol_type = other DNA
cagcagcagcagtagcagcag

SEQ ID NO: 458 - DNA, 21 bp, synthetic construct
  source 1..21: mol_type = other DNA
cagcagcagcatcagcagcag

SEQ ID NO: 459 - DNA, 21 bp, synthetic construct
  source 1..21: mol_type = other DNA
cagcagcagctgcagcagcag

SEQ ID NO: 460 - DNA, 21 bp, synthetic construct
  source 1..21: mol_type = other DNA
cagcagcagcattagcagcag

SEQ ID NO: 461 - DNA, 21 bp, synthetic construct
  source 1..21: mol_type = other DNA
cagcagcagctgtagcagcag

SEQ ID NO: 462 - DNA, 21 bp, synthetic construct
  source 1..21: mol_type = other DNA
cagcagcagtagtagcagcag

SEQ ID NO: 463 - DNA, 21 bp, synthetic construct
  source 1..21: mol_type = other DNA
cagcagcatcagtagcagcag

SEQ ID NO: 464 - DNA, 21 bp, synthetic construct
  source 1..21: mol_type = other DNA
cagcagctgcagtagcagcag

SEQ ID NO: 465 - DNA, 21 bp, synthetic construct
  source 1..21: mol_type = other DNA
cagcagtagcagtagcagcag

SEQ ID NO: 466 - DNA, 21 bp, synthetic construct
  source 1..21: mol_type = other DNA
cagcatcagcagtagcagcag

SEQ ID NO: 467 - DNA, 21 bp, synthetic construct
  source 1..21: mol_type = other DNA
cagcagcagcttcagcagcag

SEQ ID NO: 468 - DNA, 21 bp, synthetic construct
  source 1..21: mol_type = other DNA
cagcagcagtatcagcagcag

SEQ ID NO: 469 - DNA, 21 bp, synthetic construct
  source 1..21: mol_type = other DNA
cagcagcatcatcagcagcag

SEQ ID NO: 470 - DNA, 21 bp, synthetic construct
  source 1..21: mol_type = other DNA
cagcagctgcatcagcagcag

SEQ ID NO: 471 - DNA, 21 bp, synthetic construct
  source 1..21: mol_type = other DNA
cagcagtagcatcagcagcag

SEQ ID NO: 472 - DNA, 21 bp, synthetic construct
  source 1..21: mol_type = other DNA
cagcatcagcatcagcagcag

SEQ ID NO: 473 - DNA, 21 bp, synthetic construct
  source 1..21: mol_type = other DNA
cagcagcagttgcagcagcag

SEQ ID NO: 474 - DNA, 21 bp, synthetic construct
  source 1..21: mol_type = other DNA
cagcagcatctgcagcagcag

SEQ ID NO: 475 - DNA, 21 bp, synthetic construct
  source 1..21: mol_type = other DNA
cagcagctgctgcagcagcag

SEQ ID NO: 476 - DNA, 21 bp, synthetic construct
  source 1..21: mol_type = other DNA
cagcagtagctgcagcagcag

SEQ ID NO: 477 - DNA, 21 bp, synthetic construct
  source 1..21: mol_type = other DNA
cagcatcagctgcagcagcag

SEQ ID NO: 478 - DNA, 21 bp, synthetic construct
  source 1..21: mol_type = other DNA
cagcagcagcagctgcagcag

SEQ ID NO: 479 - DNA, 21 bp, synthetic construct
  source 1..21: mol_type = other DNA
cagcagcagcagttgcagcag

SEQ ID NO: 480 - DNA, 21 bp, synthetic construct
  source 1..21: mol_type = other DNA
cagcagcagcatctgcagcag

SEQ ID NO: 481 - DNA, 21 bp, synthetic construct
  source 1..21: mol_type = other DNA
cagcagcagctgctgcagcag

SEQ ID NO: 482 - DNA, 21 bp, synthetic construct
  source 1..21: mol_type = other DNA
cagcagcagtagctgcagcag

SEQ ID NO: 483 - DNA, 21 bp, synthetic construct
  source 1..21: mol_type = other DNA
cagcagcatcagctgcagcag

SEQ ID NO: 484 - DNA, 21 bp, synthetic construct
  source 1..21: mol_type = other DNA
cagcagctgcagctgcagcag

SEQ ID NO: 485 - DNA, 21 bp, synthetic construct
  source 1..21: mol_type = other DNA
cagcagtagcagctgcagcag

SEQ ID NO: 486 - DNA, 21 bp, synthetic construct
  source 1..21: mol_type = other DNA
cagcatcagcagctgcagcag

SEQ ID NO: 487 - DNA, 21 bp, synthetic construct
  source 1..21: mol_type = other DNA
cagcagcagctttagcagcag

SEQ ID NO: 488 - DNA, 21 bp, synthetic construct
  source 1..21: mol_type = other DNA
cagcagcagtattagcagcag

SEQ ID NO: 489 - DNA, 21 bp, synthetic construct
  source 1..21: mol_type = other DNA
cagcagcatcattagcagcag

SEQ ID NO: 490 - DNA, 21 bp, synthetic construct
  source 1..21: mol_type = other DNA
cagcagctgcattagcagcag

SEQ ID NO: 491 - DNA, 21 bp, synthetic construct
  source 1..21: mol_type = other DNA
cagcagtagcattagcagcag

SEQ ID NO: 492 - DNA, 21 bp, synthetic construct
  source 1..21: mol_type = other DNA
cagcagcatctgtagcagcag

SEQ ID NO: 493 - DNA, 21 bp, synthetic construct
  source 1..21: mol_type = other DNA
cagcagctgctgtagcagcag

SEQ ID NO: 494 - DNA, 21 bp, synthetic construct
  source 1..21: mol_type = other DNA
cagcatcagctgtagcagcag

SEQ ID NO: 495 - DNA, 21 bp, synthetic construct
  source 1..21: mol_type = other DNA
cagcagcatcttcagcagcag

SEQ ID NO: 496 - DNA, 21 bp, synthetic construct
  source 1..21: mol_type = other DNA
cagcagctgcttcagcagcag

SEQ ID NO: 497 - DNA, 21 bp, synthetic construct
  source 1..21: mol_type = other DNA
cagcagtagcttcagcagcag

SEQ ID NO: 498 - DNA, 21 bp, synthetic construct
  source 1..21: mol_type = other DNA
cagcatcagcattagcagcag

SEQ ID NO: 499 - DNA, 21 bp, synthetic construct
  source 1..21: mol_type = other DNA
cagcagcagttgtagcagcag

SEQ ID NO: 500 - DNA, 21 bp, synthetic construct
  source 1..21: mol_type = other DNA
cagcagtagctgtagcagcag

SEQ ID NO: 501 - DNA, 21 bp, synthetic construct
  source 1..21: mol_type = other DNA
cagcagcagtttcagcagcag

SEQ ID NO: 502 - DNA, 21 bp, synthetic construct
  source 1..21: mol_type = other DNA
cagcatcagcttcagcagcag

SEQ ID NO: 503 - DNA, 21 bp, synthetic construct
  source 1..21: mol_type = other DNA
cagcagcatctttagcagcag

SEQ ID NO: 504 - DNA, 21 bp, synthetic construct
  source 1..21: mol_type = other DNA
cagcagcttctgtagcagcag

SEQ ID NO: 505 - DNA, 21 bp, synthetic construct
  source 1..21: mol_type = other DNA
cagcatcatctgtagcagcag

SEQ ID NO: 506 - DNA, 21 bp, synthetic construct
  source 1..21: mol_type = other DNA
cagcatctgctgtagcagcag

SEQ ID NO: 507 - DNA, 21 bp, synthetic construct
  source 1..21: mol_type = other DNA
cagcagtatcttcagcagcag

SEQ ID NO: 508 - DNA, 21 bp, synthetic construct
  source 1..21: mol_type = other DNA
cagcagttgcttcagcagcag

SEQ ID NO: 509 - DNA, 21 bp, synthetic construct
  source 1..21: mol_type = other DNA
cagcagcagttttagcagcag

SEQ ID NO: 510 - DNA, 21 bp, synthetic construct
  source 1..21: mol_type = other DNA
cagcagctgctttagcagcag

SEQ ID NO: 511 - DNA, 21 bp, synthetic construct
  source 1..21: mol_type = other DNA
cagcagtagctttagcagcag

SEQ ID NO: 512 - DNA, 21 bp, synthetic construct
  source 1..21: mol_type = other DNA
cagcatcagctttagcagcag

SEQ ID NO: 513 - DNA, 21 bp, synthetic construct
  source 1..21: mol_type = other DNA
cagcagcattattagcagcag

SEQ ID NO: 514 - DNA, 21 bp, synthetic construct
  source 1..21: mol_type = other DNA
cagcagctgtattagcagcag

SEQ ID NO: 515 - DNA, 21 bp, synthetic construct
  source 1..21: mol_type = other DNA
cagcagtagtattagcagcag

SEQ ID NO: 516 - DNA, 21 bp, synthetic construct
  source 1..21: mol_type = other DNA
cagcatcagtattagcagcag

SEQ ID NO: 517 - DNA, 21 bp, synthetic construct
  source 1..21: mol_type = other DNA
cagcagcttcattagcagcag

SEQ ID NO: 518 - DNA, 21 bp, synthetic construct
  source 1..21: mol_type = other DNA
cagcagtatcattagcagcag

SEQ ID NO: 519 - DNA, 21 bp, synthetic construct
  source 1..21: mol_type = other DNA
cagcatcatcattagcagcag

SEQ ID NO: 520 - DNA, 21 bp, synthetic construct
  source 1..21: mol_type = other DNA
cagcagttgcattagcagcag

SEQ ID NO: 521 - DNA, 21 bp, synthetic construct
  source 1..21: mol_type = other DNA
cagcatctgcattagcagcag

SEQ ID NO: 522 - DNA, 21 bp, synthetic construct
  source 1..21: mol_type = other DNA
cagcattagcattagcagcag

SEQ ID NO: 523 - DNA, 21 bp, synthetic construct
  source 1..21: mol_type = other DNA
cagcagcatttgtagcagcag

SEQ ID NO: 524 - DNA, 21 bp, synthetic construct
  source 1..21: mol_type = other DNA
cagcagctgttgtagcagcag

SEQ ID NO: 525 - DNA, 21 bp, synthetic construct
  source 1..21: mol_type = other DNA
cagcagtagttgtagcagcag

SEQ ID NO: 526 - DNA, 21 bp, synthetic construct
  source 1..21: mol_type = other DNA
cagcatcagttgtagcagcag

SEQ ID NO: 527 - DNA, 21 bp, synthetic construct
  source 1..21: mol_type = other DNA
cagcagtatctgtagcagcag

SEQ ID NO: 528 - DNA, 21 bp, synthetic construct
  source 1..21: mol_type = other DNA
cagcagttgctgtagcagcag

SEQ ID NO: 529 - DNA, 21 bp, synthetic construct
  source 1..21: mol_type = other DNA
cagcattagctgtagcagcag

SEQ ID NO: 530 - DNA, 21 bp, synthetic construct
  source 1..21: mol_type = other DNA
cagcagcattttcagcagcag

SEQ ID NO: 531 - DNA, 21 bp, synthetic construct
  source 1..21: mol_type = other DNA
cagcagctgtttcagcagcag

SEQ ID NO: 532 - DNA, 21 bp, synthetic construct
  source 1..21: mol_type = other DNA
cagcagtagtttcagcagcag

SEQ ID NO: 533 - DNA, 21 bp, synthetic construct
  source 1..21: mol_type = other DNA
cagcatcagtttcagcagcag

SEQ ID NO: 534 - DNA, 21 bp, synthetic construct
  source 1..21: mol_type = other DNA
cagcagcttcttcagcagcag

SEQ ID NO: 535 - DNA, 21 bp, synthetic construct
  source 1..21: mol_type = other DNA
cagcatcatcttcagcagcag

SEQ ID NO: 536 - DNA, 21 bp, synthetic construct
  source 1..21: mol_type = other DNA
cagcatctgcttcagcagcag

SEQ ID NO: 537 - DNA, 21 bp, synthetic construct
  source 1..21: mol_type = other DNA
cagcattagcttcagcagcag

SEQ ID NO: 538 - RNA, 21 nt, synthetic construct
  source 1..21: mol_type = other RNA
gcagcagcagaagcagcagca

SEQ ID NO: 539 - RNA, 21 nt, synthetic construct
  source 1..21: mol_type = other RNA
gcagcagcaacagcagcagca

SEQ ID NO: 540 - RNA, 21 nt, synthetic construct
  source 1..21: mol_type = other RNA
gcagcagcagcagcagcagca

SEQ ID NO: 541 - RNA, 21 nt, synthetic construct
  source 1..21: mol_type = other RNA
gcagcagaagaagcagcagca

SEQ ID NO: 542 - RNA, 21 nt, synthetic construct
  source 1..21: mol_type = other RNA
gcagcaacagaagcagcagca

SEQ ID NO: 543 - RNA, 21 nt, synthetic construct
  source 1..21: mol_type = other RNA
gcagaagcagaagcagcagca

SEQ ID NO: 544 - RNA, 21 nt, synthetic construct
  source 1..21: mol_type = other RNA
gcaacagcagaagcagcagca

SEQ ID NO: 545 - RNA, 21 nt, synthetic construct
  source 1..21: mol_type = other RNA
gcagcagaaacagcagcagca

SEQ ID NO: 546 - RNA, 21 nt, synthetic construct
  source 1..21: mol_type = other RNA
gcagcaacaacagcagcagca

SEQ ID NO: 547 - RNA, 21 nt, synthetic construct
  source 1..21: mol_type = other RNA
gcagaagcaacagcagcagca

SEQ ID NO: 548 - RNA, 21 nt, synthetic construct
  source 1..21: mol_type = other RNA
gcaacagcaacagcagcagca

SEQ ID NO: 549 - RNA, 21 nt, synthetic construct
  source 1..21: mol_type = other RNA
gcagcagaagcagcagcagca

SEQ ID NO: 550 - RNA, 21 nt, synthetic construct
  source 1..21: mol_type = other RNA
gcagcaacagcagcagcagca

SEQ ID NO: 551 - RNA, 21 nt, synthetic construct
  source 1..21: mol_type = other RNA
gcagaagcagcagcagcagca

SEQ ID NO: 552 - RNA, 21 nt, synthetic construct
  source 1..21: mol_type = other RNA
gcaacagcagcagcagcagca

SEQ ID NO: 553 - RNA, 21 nt, synthetic construct
  source 1..21: mol_type = other RNA
gcagcagaaaaagcagcagca

SEQ ID NO: 554 - RNA, 21 nt, synthetic construct
  source 1..21: mol_type = other RNA
gcagcaacaaaagcagcagca

SEQ ID NO: 555 - RNA, 21 nt, synthetic construct
  source 1..21: mol_type = other RNA
gcagcagcaaaagcagcagca

SEQ ID NO: 556 - RNA, 21 nt, synthetic construct
  source 1..21: mol_type = other RNA
gcagaagcaaaagcagcagca

SEQ ID NO: 557 - RNA, 21 nt, synthetic construct
  source 1..21: mol_type = other RNA
gcaacagcaaaagcagcagca

SEQ ID NO: 558 - RNA, 21 nt, synthetic construct
  source 1..21: mol_type = other RNA
gcaacaacagaagcagcagca

SEQ ID NO: 559 - RNA, 21 nt, synthetic construct
  source 1..21: mol_type = other RNA
gcagaaacaacagcagcagca

SEQ ID NO: 560 - RNA, 21 nt, synthetic construct
  source 1..21: mol_type = other RNA
gcagcaaaaaaagcagcagca

SEQ ID NO: 561 - RNA, 21 nt, synthetic construct
  source 1..21: mol_type = other RNA
gcagaagaaaaagcagcagca

SEQ ID NO: 562 - RNA, 21 nt, synthetic construct
  source 1..21: mol_type = other RNA
gcaacagaaaaagcagcagca

SEQ ID NO: 563 - RNA, 21 nt, synthetic construct
  source 1..21: mol_type = other RNA
gcagaaacaaaagcagcagca

SEQ ID NO: 564 - RNA, 21 nt, synthetic construct
  source 1..21: mol_type = other RNA
gcaacaacaaaagcagcagca

SEQ ID NO: 565 - RNA, 21 nt, synthetic construct
  source 1..21: mol_type = other RNA
gcaaaagcaaaagcagcagca

SEQ ID NO: 566 - RNA, 21 nt, synthetic construct
  source 1..21: mol_type = other RNA
gcagcaaaagaagcagcagca

SEQ ID NO: 567 - RNA, 21 nt, synthetic construct
  source 1..21: mol_type = other RNA
gcagaagaagaagcagcagca

SEQ ID NO: 568 - RNA, 21 nt, synthetic construct
  source 1..21: mol_type = other RNA
gcaacagaagaagcagcagca

SEQ ID NO: 569 - RNA, 21 nt, synthetic construct
  source 1..21: mol_type = other RNA
gcagaaacagaagcagcagca

SEQ ID NO: 570 - RNA, 21 nt, synthetic construct
  source 1..21: mol_type = other RNA
gcaaaagcagaagcagcagca

SEQ ID NO: 571 - RNA, 21 nt, synthetic construct
  source 1..21: mol_type = other RNA
gcagcaaaaacagcagcagca

SEQ ID NO: 572 - RNA, 21 nt, synthetic construct
  source 1..21: mol_type = other RNA
gcagaagaaacagcagcagca

SEQ ID NO: 573 - RNA, 21 nt, synthetic construct
  source 1..21: mol_type = other RNA
gcaacagaaacagcagcagca

SEQ ID NO: 574 - RNA, 21 nt, synthetic construct
  source 1..21: mol_type = other RNA
gcaacaacaacagcagcagca

SEQ ID NO: 575 - RNA, 21 nt, synthetic construct
  source 1..21: mol_type = other RNA
gcaaaagcaacagcagcagca

SEQ ID NO: 576 - DNA, 117 bp, synthetic construct
  source 1..117: mol_type = other DNA
tgcacacctcctggcgggcagctctgctgctgctactgctgctgctgtgttctggcaatacctgcagcagcagcagaagcagcagcagggaggcctgccctgactgcccactttttg

SEQ ID NO: 577 - DNA, 117 bp, synthetic construct
  source 1..117: mol_type = other DNA
tgcacacctcctggcgggcagctctgctgctgctgatgctgctgctgtgttctggcaatacctgcagcagcagcaacagcagcagcagggaggcctgccctgactgcccactttttg

SEQ ID NO: 578 - DNA, 117 bp, synthetic construct
  source 1..117: mol_type = other DNA
tgcacacctcctggcgggcagctctgctgctgctgcagctgctgctgtgttctggcaatacctgcagcagcagcagcagcagcagcagggaggcctgccctgactgcccactttttg

SEQ ID NO: 579 - DNA, 117 bp, synthetic construct
  source 1..117: mol_type = other DNA
tgcacacctcctggcgggcagctctgctgctgctaatgctgctgctgtgttctggcaatacctgcagcagcagcaaaagcagcagcagggaggcctgccctgactgcccactttttg

SEQ ID NO: 580 - DNA, 117 bp, synthetic construct
  source 1..117: mol_type = other DNA
tgcacacctcctggcgggcagctctgctgctgctacagctgctgctgtgttctggcaatacctgcagcagcagcagaagcagcagcagggaggcctgccctgactgcccactttttg

SEQ ID NO: 581 - DNA, 117 bp, synthetic construct
  source 1..117: mol_type = other DNA
tgcacacctcctggcgggcagctctgctgctgctactactgctgctgtgttctggcaatacctgcagcagcagaagaagcagcagcagggaggcctgccctgactgcccactttttg

SEQ ID NO: 582 - DNA, 117 bp, synthetic construct
  source 1..117: mol_type = other DNA
tgcacacctcctggcgggcagctctgctgctgctactgatgctgctgtgttctggcaatacctgcagcagcaacagaagcagcagcagggaggcctgccctgactgcccactttttg

SEQ ID NO: 583 - DNA, 117 bp, synthetic construct
  source 1..117: mol_type = other DNA
tgcacacctcctggcgggcagctctgctgctgctactgcagctgctgtgttctggcaatacctgcagcagcagcagaagcagcagcagggaggcctgccctgactgcccactttttg

SEQ ID NO: 584 - DNA, 117 bp, synthetic construct
  source 1..117: mol_type = other DNA
tgcacacctcctggcgggcagctctgctgctgctactgctactgctgtgttctggcaatacctgcagcagaagcagaagcagcagcagggaggcctgccctgactgcccactttttg

SEQ ID NO: 585 - DNA, 117 bp, synthetic construct
  source 1..117: mol_type = other DNA
tgcacacctcctggcgggcagctctgctgctgctactgctgatgctgtgttctggcaatacctgcagcaacagcagaagcagcagcagggaggcctgccctgactgcccactttttg

SEQ ID NO: 586 - DNA, 117 bp, synthetic construct
  source 1..117: mol_type = other DNA
tgcacacctcctggcgggcagctctgctgctgctgaagctgctgctgtgttctggcaatacctgcagcagcagcaacagcagcagcagggaggcctgccctgactgcccactttttg

SEQ ID NO: 587 - DNA, 117 bp, synthetic construct
  source 1..117: mol_type = other DNA
tgcacacctcctggcgggcagctctgctgctgctgatactgctgctgtgttctggcaatacctgcagcagcagaaacagcagcagcagggaggcctgccctgactgcccactttttg

SEQ ID NO: 588 - DNA, 117 bp, synthetic construct
  source 1..117: mol_type = other DNA
tgcacacctcctggcgggcagctctgctgctgctgatgatgctgctgtgttctggcaatacctgcagcagcaacaacagcagcagcagggaggcctgccctgactgcccactttttg

SEQ ID NO: 589 - DNA, 117 bp, synthetic construct
  source 1..117: mol_type = other DNA
tgcacacctcctggcgggcagctctgctgctgctgatgcagctgctgtgttctggcaatacctgcagcagcagcaacagcagcagcagggaggcctgccctgactgcccactttttg

SEQ ID NO: 590 - DNA, 117 bp, synthetic construct
  source 1..117: mol_type = other DNA
tgcacacctcctggcgggcagctctgctgctgctgatgctactgctgtgttctggcaatacctgcagcagaagcaacagcagcagcagggaggcctgccctgactgcccactttttg

SEQ ID NO: 591 - DNA, 117 bp, synthetic construct
  source 1..117: mol_type = other DNA
tgcacacctcctggcgggcagctctgctgctgctgatgctgatgctgtgttctggcaatacctgcagcaacagcaacagcagcagcagggaggcctgccctgactgcccactttttg

SEQ ID NO: 592 - DNA, 117 bp, synthetic construct
  source 1..117: mol_type = other DNA
tgcacacctcctggcgggcagctctgctgctgctgcaactgctgctgtgttctggcaatacctgcagcagcagaagcagcagcagcagggaggcctgccctgactgcccactttttg

SEQ ID NO: 593 - DNA, 117 bp, synthetic construct
  source 1..117: mol_type = other DNA
tgcacacctcctggcgggcagctctgctgctgctgcagatgctgctgtgttctggcaatacctgcagcagcaacagcagcagcagcagggaggcctgccctgactgcccactttttg

SEQ ID NO: 594 - DNA, 117 bp, synthetic construct
  source 1..117: mol_type = other DNA
tgcacacctcctggcgggcagctctgctgctgctgcagcagctgctgtgttctggcaatacctgcagcagcagcagcagcagcagcagggaggcctgccctgactgcccactttttg

SEQ ID NO: 595 - DNA, 117 bp, synthetic construct
  source 1..117: mol_type = other DNA
tgcacacctcctggcgggcagctctgctgctgctgcagctactgctgtgttctggcaatacctgcagcagaagcagcagcagcagcagggaggcctgccctgactgcccactttttg

SEQ ID NO: 596 - DNA, 117 bp, synthetic construct
  source 1..117: mol_type = other DNA
tgcacacctcctggcgggcagctctgctgctgctgcagctgatgctgtgttctggcaatacctgcagcaacagcagcagcagcagcagggaggcctgccctgactgcccactttttg

SEQ ID NO: 597 - DNA, 117 bp, synthetic construct
  source 1..117: mol_type = other DNA
tgcacacctcctggcgggcagctctgctgctgcagctgctgctgctgtgttctggcaatacctgcagcagcagcagcagcagcagcagggaggcctgccctgactgcccactttttg

SEQ ID NO: 598 - DNA, 117 bp, synthetic construct
  source 1..117: mol_type = other DNA
tgcacacctcctggcgggcagctctgctgctgcaactgctgctgctgtgttctggcaatacctgcagcagcagcagaagcagcagcagggaggcctgccctgactgcccactttttg

SEQ ID NO: 599 - DNA, 117 bp, synthetic construct
  source 1..117: mol_type = other DNA
tgcacacctcctggcgggcagctctgctgctgcagatgctgctgctgtgttctggcaatacctgcagcagcagcaacagcagcagcagggaggcctgccctgactgcccactttttg

SEQ ID NO: 600 - DNA, 117 bp, synthetic construct
  source 1..117: mol_type = other DNA
tgcacacctcctggcgggcagctctgctgctgcagcagctgctgctgtgttctggcaatacctgcagcagcagcagcagcagcagcagggaggcctgccctgactgcccactttttg

SEQ ID NO: 601 - DNA, 117 bp, synthetic construct
  source 1..117: mol_type = other DNA
tgcacacctcctggcgggcagctctgctgctgcagctactgctgctgtgttctggcaatacctgcagcagcagaagcagcagcagcagggaggcctgccctgactgcccactttttg

SEQ ID NO: 602 - DNA, 117 bp, synthetic construct
  source 1..117: mol_type = other DNA
tgcacacctcctggcgggcagctctgctgctgcagctgatgctgctgtgttctggcaatacctgcagcagcaacagcagcagcagcagggaggcctgccctgactgcccactttttg

SEQ ID NO: 603 - DNA, 117 bp, synthetic construct
  source 1..117: mol_type = other DNA
tgcacacctcctggcgggcagctctgctgctgcagctgcagctgctgtgttctggcaatacctgcagcagcagcagcagcagcagcagggaggcctgccctgactgcccactttttg

SEQ ID NO: 604 - DNA, 117 bp, synthetic construct
  source 1..117: mol_type = other DNA
tgcacacctcctggcgggcagctctgctgctgcagctgctactgctgtgttctggcaatacctgcagcagaagcagcagcagcagcagggaggcctgccctgactgcccactttttg

SEQ ID NO: 605 - DNA, 117 bp, synthetic construct
  source 1..117: mol_type = other DNA
tgcacacctcctggcgggcagctctgctgctgcagctgctgatgctgtgttctggcaatacctgcagcaacagcagcagcagcagcagggaggcctgccctgactgcccactttttg

SEQ ID NO: 606 - DNA, 117 bp, synthetic construct
  source 1..117: mol_type = other DNA
tgcacacctcctggcgggcagctctgctgctgctaaagctgctgctgtgttctggcaatacctgcagcagcagcaaaagcagcagcagggaggcctgccctgactgcccactttttg

SEQ ID NO: 607 - DNA, 117 bp, synthetic construct
  source 1..117: mol_type = other DNA
tgcacacctcctggcgggcagctctgctgctgctaatactgctgctgtgttctggcaatacctgcagcagcagaaaaagcagcagcagggaggcctgccctgactgcccactttttg

SEQ ID NO: 608 - DNA, 117 bp, synthetic construct
  source 1..117: mol_type = other DNA
tgcacacctcctggcgggcagctctgctgctgctaatgatgctgctgtgttctggcaatacctgcagcagcaacaaaagcagcagcagggaggcctgccctgactgcccactttttg

SEQ ID NO: 609 - DNA, 117 bp, synthetic construct
  source 1..117: mol_type = other DNA
tgcacacctcctggcgggcagctctgctgctgctaatgcagctgctgtgttctggcaatacctgcagcagcagcaaaagcagcagcagggaggcctgccctgactgcccactttttg

SEQ ID NO: 610 - DNA, 117 bp, synthetic construct
  source 1..117: mol_type = other DNA
tgcacacctcctggcgggcagctctgctgctgctaatgctactgctgtgttctggcaatacctgcagcagaagcaaaagcagcagcagggaggcctgccctgactgcccactttttg

SEQ ID NO: 611 - DNA, 117 bp, synthetic construct
  source 1..117: mol_type = other DNA
tgcacacctcctggcgggcagctctgctgctgctacagatgctgctgtgttctggcaatacctgcagcagcaacagaagcagcagcagggaggcctgccctgactgcccactttttg

SEQ ID NO: 612 - DNA, 117 bp, synthetic construct
  source 1..117: mol_type = other DNA
tgcacacctcctggcgggcagctctgctgctgctacagcagctgctgtgttctggcaatacctgcagcagcagcagaagcagcagcagggaggcctgccctgactgcccactttttg

SEQ ID NO: 613 - DNA, 117 bp, synthetic construct
  source 1..117: mol_type = other DNA
tgcacacctcctggcgggcagctctgctgctgctacagctgatgctgtgttctggcaatacctgcagcaacagcagaagcagcagcagggaggcctgccctgactgcccactttttg

SEQ ID NO: 614 - DNA, 117 bp, synthetic construct
  source 1..117: mol_type = other DNA
tgcacacctcctggcgggcagctctgctgctgctgaagatgctgctgtgttctggcaatacctgcagcagcaacaacagcagcagcagggaggcctgccctgactgcccactttttg

SEQ ID NO: 615 - DNA, 117 bp, synthetic construct
  source 1..117: mol_type = other DNA
tgcacacctcctggcgggcagctctgctgctgctgaagcagctgctgtgttctggcaatacctgcagcagcagcaacagcagcagcagggaggcctgccctgactgcccactttttg

SEQ ID NO: 616 - DNA, 117 bp, synthetic construct
  source 1..117: mol_type = other DNA
tgcacacctcctggcgggcagctctgctgctgctgaagctactgctgtgttctggcaatacctgcagcagaagcaacagcagcagcagggaggcctgccctgactgcccactttttg

SEQ ID NO: 617 - DNA, 117 bp, synthetic construct
  source 1..117: mol_type = other DNA
tgcacacctcctggcgggcagctctgctgctgctaatgctgatgctgtgttctggcaatacctgcagcaacagcaaaagcagcagcagggaggcctgccctgactgcccactttttg

SEQ ID NO: 618 - DNA, 117 bp, synthetic construct
  source 1..117: mol_type = other DNA
tgcacacctcctggcgggcagctctgctgctgctacaactgctgctgtgttctggcaatacctgcagcagcagaagaagcagcagcagggaggcctgccctgactgcccactttttg

SEQ ID NO: 619 - DNA, 117 bp, synthetic construct
  source 1..117: mol_type = other DNA
tgcacacctcctggcgggcagctctgctgctgctacagctactgctgtgttctggcaatacctgcagcagaagcagaagcagcagcagggaggcctgccctgactgcccactttttg

SEQ ID NO: 620 - DNA, 117 bp, synthetic construct
  source 1..117: mol_type = other DNA
tgcacacctcctggcgggcagctctgctgctgctgaaactgctgctgtgttctggcaatacctgcagcagcagaaacagcagcagcagggaggcctgccctgactgcccactttttg

SEQ ID NO: 621 - DNA, 117 bp, synthetic construct
  source 1..117: mol_type = other DNA
tgcacacctcctggcgggcagctctgctgctgctgaagctgatgctgtgttctggcaatacctgcagcaacagcaacagcagcagcagggaggcctgccctgactgcccactttttg

SEQ ID NO: 622 - DNA, 117 bp, synthetic construct
  source 1..117: mol_type = other DNA
tgcacacctcctggcgggcagctctgctgctgctaaagatgctgctgtgttctggcaatacctgcagcagcaacaaaagcagcagcagggaggcctgccctgactgcccactttttg

SEQ ID NO: 623 - DNA, 117 bp, synthetic construct
  source 1..117: mol_type = other DNA
tgcacacctcctggcgggcagctctgctgctgctacagaagctgctgtgttctggcaatacctgcagcagcaacagaagcagcagcagggaggcctgccctgactgcccactttttg

SEQ ID NO: 624 - DNA, 117 bp, synthetic construct
  source 1..117: mol_type = other DNA
tgcacacctcctggcgggcagctctgctgctgctacagatgatgctgtgttctggcaatacctgcagcaacaacagaagcagcagcagggaggcctgccctgactgcccactttttg

SEQ ID NO: 625 - DNA, 117 bp, synthetic construct
  source 1..117: mol_type = other DNA
tgcacacctcctggcgggcagctctgctgctgctacagcagatgctgtgttctggcaatacctgcagcaacagcagaagcagcagcagggaggcctgccctgactgcccactttttg

SEQ ID NO: 626 - DNA, 117 bp, synthetic construct
  source 1..117: mol_type = other DNA
tgcacacctcctggcgggcagctctgctgctgctgaagatactgctgtgttctggcaatacctgcagcagaaacaacagcagcagcagggaggcctgccctgactgcccactttttg

SEQ ID NO: 627 - DNA, 117 bp, synthetic construct
  source 1..117: mol_type = other DNA
tgcacacctcctggcgggcagctctgctgctgctgaagcaactgctgtgttctggcaatacctgcagcagaagcaacagcagcagcagggaggcctgccctgactgcccactttttg

SEQ ID NO: 628 - DNA, 117 bp, synthetic construct
  source 1..117: mol_type = other DNA
tgcacacctcctggcgggcagctctgctgctgctaaaactgctgctgtgttctggcaatacctgcagcagcagaaaaagcagcagcagggaggcctgccctgactgcccactttttg

SEQ ID NO: 629 - DNA, 117 bp, synthetic construct
  source 1..117: mol_type = other DNA
tgcacacctcctggcgggcagctctgctgctgctaaagcagctgctgtgttctggcaatacctgcagcagcagcaaaagcagcagcagggaggcctgccctgactgcccactttttg

SEQ ID NO: 630 - DNA, 117 bp, synthetic construct
  source 1..117: mol_type = other DNA
tgcacacctcctggcgggcagctctgctgctgctaaagctactgctgtgttctggcaatacctgcagcagaagcaaaagcagcagcagggaggcctgccctgactgcccactttttg

SEQ ID NO: 631 - DNA, 117 bp, synthetic construct
  source 1..117: mol_type = other DNA
tgcacacctcctggcgggcagctctgctgctgctaaagctgatgctgtgttctggcaatacctgcagcaacagcaaaagcagcagcagggaggcctgccctgactgcccactttttg

SEQ ID NO: 632 - DNA, 117 bp, synthetic construct
  source 1..117: mol_type = other DNA
tgcacacctcctggcgggcagctctgctgctgctaataatgctgctgtgttctggcaatacctgcagcagcaaaaaaagcagcagcagggaggcctgccctgactgcccactttttg

SEQ ID NO: 633 - DNA, 117 bp, synthetic construct
  source 1..117: mol_type = other DNA
tgcacacctcctggcgggcagctctgctgctgctaatacagctgctgtgttctggcaatacctgcagcagcagaaaaagcagcagcagggaggcctgccctgactgcccactttttg

SEQ ID NO: 634 - DNA, 117 bp, synthetic construct
  source 1..117: mol_type = other DNA
tgcacacctcctggcgggcagctctgctgctgctaatactactgctgtgttctggcaatacctgcagcagaagaaaaagcagcagcagggaggcctgccctgactgcccactttttg

SEQ ID NO: 635 - DNA, 117 bp, synthetic construct
  source 1..117: mol_type = other DNA
tgcacacctcctggcgggcagctctgctgctgctaatactgatgctgtgttctggcaatacctgcagcaacagaaaaagcagcagcagggaggcctgccctgactgcccactttttg

SEQ ID NO: 636 - DNA, 117 bp, synthetic construct
  source 1..117: mol_type = other DNA
tgcacacctcctggcgggcagctctgctgctgctaatgaagctgctgtgttctggcaatacctgcagcagcaacaaaagcagcagcagggaggcctgccctgactgcccactttttg

SEQ ID NO: 637 - DNA, 117 bp, synthetic construct
  source 1..117: mol_type = other DNA
tgcacacctcctggcgggcagctctgctgctgctaatgatactgctgtgttctggcaatacctgcagcagaaacaaaagcagcagcagggaggcctgccctgactgcccactttttg

SEQ ID NO: 638 - DNA, 117 bp, synthetic construct
  source 1..117: mol_type = other DNA
tgcacacctcctggcgggcagctctgctgctgctaatgatgatgctgtgttctggcaatacctgcagcaacaacaaaagcagcagcagggaggcctgccctgactgcccactttttg

SEQ ID NO: 639 - DNA, 117 bp, synthetic construct
  source 1..117: mol_type = other DNA
tgcacacctcctggcgggcagctctgctgctgctaatgcaactgctgtgttctggcaatacctgcagcagaagcaaaagcagcagcagggaggcctgccctgactgcccactttttg

SEQ ID NO: 640 - DNA, 117 bp, synthetic construct
  source 1..117: mol_type = other DNA
tgcacacctcctggcgggcagctctgctgctgctaatgcagatgctgtgttctggcaatacctgcagcaacagcaaaagcagcagcagggaggcctgccctgactgcccactttttg

SEQ ID NO: 641 - DNA, 117 bp, synthetic construct
  source 1..117: mol_type = other DNA
tgcacacctcctggcgggcagctctgctgctgctaatgctaatgctgtgttctggcaatacctgcagcaaaagcaaaagcagcagcagggaggcctgccctgactgcccactttttg

SEQ ID NO: 642 - DNA, 117 bp, synthetic construct
  source 1..117: mol_type = other DNA
tgcacacctcctggcgggcagctctgctgctgctacaaatgctgctgtgttctggcaatacctgcagcagcaaaagaagcagcagcagggaggcctgccctgactgcccactttttg

SEQ ID NO: 643 - DNA, 117 bp, synthetic construct
  source 1..117: mol_type = other DNA
tgcacacctcctggcgggcagctctgctgctgctacaacagctgctgtgttctggcaatacctgcagcagcagaagaagcagcagcagggaggcctgccctgactgcccactttttg

SEQ ID NO: 644 - DNA, 117 bp, synthetic construct
  source 1..117: mol_type = other DNA
tgcacacctcctggcgggcagctctgctgctgctacaactactgctgtgttctggcaatacctgcagcagaagaagaagcagcagcagggaggcctgccctgactgcccactttttg

SEQ ID NO: 645 - DNA, 117 bp, synthetic construct
  source 1..117: mol_type = other DNA
tgcacacctcctggcgggcagctctgctgctgctacaactgatgctgtgttctggcaatacctgcagcaacagaagaagcagcagcagggaggcctgccctgactgcccactttttg

SEQ ID NO: 646 - DNA, 117 bp, synthetic construct
  source 1..117: mol_type = other DNA
tgcacacctcctggcgggcagctctgctgctgctacagatactgctgtgttctggcaatacctgcagcagaaacagaagcagcagcagggaggcctgccctgactgcccactttttg

SEQ ID NO: 647 - DNA, 117 bp, synthetic construct
  source 1..117: mol_type = other DNA
tgcacacctcctggcgggcagctctgctgctgctacagcaactgctgtgttctggcaatacctgcagcagaagcagaagcagcagcagggaggcctgccctgactgcccactttttg

SEQ ID NO: 648 - DNA, 117 bp, synthetic construct
  source 1..117: mol_type = other DNA
tgcacacctcctggcgggcagctctgctgctgctacagctaatgctgtgttctggcaatacctgcagcaaaagcagaagcagcagcagggaggcctgccctgactgcccactttttg

SEQ ID NO: 649 - DNA, 117 bp, synthetic construct
  source 1..117: mol_type = other DNA
tgcacacctcctggcgggcagctctgctgctgctgaaaatgctgctgtgttctggcaatacctgcagcagcaaaaacagcagcagcagggaggcctgccctgactgcccactttttg

SEQ ID NO: 650 - DNA, 117 bp, synthetic construct
  source 1..117: mol_type = other DNA
tgcacacctcctggcgggcagctctgctgctgctgaaacagctgctgtgttctggcaatacctgcagcagcagaaacagcagcagcagggaggcctgccctgactgcccactttttg

SEQ ID NO: 651 - DNA, 117 bp, synthetic construct
  source 1..117: mol_type = other DNA
tgcacacctcctggcgggcagctctgctgctgctgaaactactgctgtgttctggcaatacctgcagcagaagaaacagcagcagcagggaggcctgccctgactgcccactttttg

SEQ ID NO: 652 - DNA, 117 bp, synthetic construct
  source 1..117: mol_type = other DNA
tgcacacctcctggcgggcagctctgctgctgctgaaactgatgctgtgttctggcaatacctgcagcaacagaaacagcagcagcagggaggcctgccctgactgcccactttttg

SEQ ID NO: 653 - DNA, 117 bp, synthetic construct
  source 1..117: mol_type = other DNA
tgcacacctcctggcgggcagctctgctgctgctgaagaagctgctgtgttctggcaatacctgcagcagcaacaacagcagcagcagggaggcctgccctgactgcccactttttg

SEQ ID NO: 654 - DNA, 117 bp, synthetic construct
  source 1..117: mol_type = other DNA
tgcacacctcctggcgggcagctctgctgctgctgaagatgatgctgtgttctggcaatacctgcagcaacaacaacagcagcagcagggaggcctgccctgactgcccactttttg

SEQ ID NO: 655 - DNA, 117 bp, synthetic construct
  source 1..117: mol_type = other DNA
tgcacacctcctggcgggcagctctgctgctgctgaagcagatgctgtgttctggcaatacctgcagcaacagcaacagcagcagcagggaggcctgccctgactgcccactttttg

SEQ ID NO: 656 - DNA, 117 bp, synthetic construct
  source 1..117: mol_type = other DNA
tgcacacctcctggcgggcagctctgctgctgctgaagctaatgctgtgttctggcaatacctgcagcaaaagcaacagcagcagcagggaggcctgccctgactgcccactttttg

SEQ ID NO: 657 - DNA, 4624 bp, synthetic construct
  source 1..4624: mol_type = other DNA
caactttgtatagaaaagttggagggcctatttcccatgattccttcatatttgcatatacgatacaaggctgttagagagataattggaattaatttgactgtaaacacaaagatattagtacaaaatacgtgacgtagaaagtaataatttcttgggtagtttgcagttttaaaattatgttttaaaatggactatcatatgcttaccgtaacttgaaagtatttcgatttcttggctttatatatcttgtggaaaggacgaaacaccgtgcacacctcctggcgggcagctctgctgctgctactgctgctgctgtgttctggcaatacctgcagcagcagcagaagcagcagcagggaggcctgccctgactgcccactttttgtttttcaagtttgtacaaaaaagcaggctgggttgcgccttttccaaggcagccctgggtttgcgcagggacgcggctgctctgggcgtggttccgggaaacgcagcggcgccgaccctgggtctcgcacattcttcacgtccgttcgcagcgtcacccggatcttcgccgctacccttgtgggccccccggcgacgcttcctgctccgcccctaagtcgggaaggttccttgcggttcgcggcgtgccggacgtgacaaacggaagccgcacgtctcactagtaccctcgcagacggacagcgccagggagcaatggcagcgcgccgaccgcgatgggctgtggccaatagcggctgctcagcagggcgcgccgagagcagcggccgggaaggggcggtgcgggaggcggggtgtggggcggtagtgtgggccctgttcctgcccgcgcggtgttccgcattctgcaagcctccggagcgcacgtcggcagtcggctccctcgttgaccgaatcaccgacctctctccccaggacccagctttcttgtacaaagtgggccaccatggtgagcaagggcgaggagctgttcaccggggtggtgcccatcctggtcgagctggacggcgacgtaaacggccacaagttcagcgtgtccggcgagggcgagggcgatgccacctacggcaagctgaccctgaagttcatctgcaccaccggcaagctgcccgtgccctggcccaccctcgtgaccaccctgacctacggcgtgcagtgcttcagccgctaccccgaccacatgaagcagcacgacttcttcaagtccgccatgcccgaaggctacgtccaggagcgcaccatcttcttcaaggacgacggcaactacaagacccgcgccgaggtgaagttcgagggcgacaccctggtgaaccgcatcgagctgaagggcatcgacttcaaggaggacggcaacatcctggggcacaagctggagtacaactacaacagccacaacgtctatatcatggccgacaagcagaagaacggcatcaaggtgaacttcaagatccgccacaacatcgaggacggcagcgtgcagctcgccgaccactaccagcagaacacccccatcggcgacggccccgtgctgctgcccgacaaccactacctgagcacccagtccgccctgagcaaagaccccaacgagaagcgcgatcacatggtcctgctggagttcgtgaccgccgccgggatcactctcggcatggacgagctgtacaagggaagcggagagggcaggggaagtcttctaacatgcggggacgtggaggaaaatcccggccccatgaccgagtacaagcccacggtgcgcctcgccacccgcgacgacgtccccagggccgtacgcaccctcgccgccgcgttcgccgactaccccgccacgcgccacaccgtcgatccggaccgccacatcgagcgggtcaccgagctgcaagaactcttcctcacgcgcgtcgggctcgacatcggcaaggtgtgggtcgcggacgacggcgccgcggtggcggtctggaccacgccggagagcgtcgaagcgggggcggtgttcgccgagatcggcccgcgcatggccgagttgagcggttcccggctggccgcgcagcaacagatggaaggcctcctggcgccgcaccggcccaaggagcccgcgtggttcctggccaccgtcggcgtctcgcccgaccaccagggcaagggtctgggcagcgccgtcgtgctccccggagtggaggcggccgagcgcgccggggtgcccgccttcctggagacctccgcgccccgcaacctccccttctacgagcggctcggcttcaccgtcaccgccgacgtcgaggtgcccgaaggaccgcgcacctggtgcatgacccgcaagcccggtgcctgacaactttattatacatagttgatggccggccgcttcgagcagacatgataagatacattgatgagtttggacaaaccacaactagaatgcagtgaaaaaaatgctttatttgtgaaatttgtgatgctattgctttatttgtaaccattataagctgcaataaacaagttaacaacaacaattgcattcattttatgtttcaggttcagggggaggtgtgggaggttttttaaagcaagtaaaacctctacaaatgtggtagcggccgcggcgctcttccgcttcctcgctcactgactcgctgcgctcggtcgttcggctgcggcgagcggtatcagctcactcaaaggcggtaatacggttatccacagaatcaggggataacgcaggaaagaacatgtgagcaaaaggccagcaaaaggccaggaaccgtaaaaaggccgcgttgctggcgtttttccataggctccgcccccctgacgagcatcacaaaaatcgacgctcaagtcagaggtggcgaaacccgacaggactataaagataccaggcgtttccccctggaagctccctcgtgcgctctcctgttccgaccctgccgcttaccggatacctgtccgcctttctctcttcgggaagcgtggcgctttctcatagctcacgctgtaggtatctcagttcggtgtaggtcgttcgctccaagctgggctgtgtgcacgaaccccccgttcagcccgaccgctgcgccttatccggtaactatcgtcttgagtccaacccggtaagacacgacttatcgccactggcagcagccactggtaacaggattagcagagcgaggtatgtaggcggtgctacagagttcttgaagtggtggcctaactacggctacactagaagaacagtatttggtatctgcgctctgctgaagccagttaccttcggaaaaagagttggtagctcttgatccggcaaacaaaccaccgctggtagcggtggtttttttgtttgcaagcagcagattacgcgcagaaaaaaaggatctcaagaagatcctttgatcttttctacggggtctgacgctcagtggaacgaaaactcacgttaagggattttggtcatgagattatcaaaaaggatcttcacctagatccttttaaattaaaaatgaagttttaaatcaatctaaagtatatatgagtaaacttggtctgacagttaccaatgcttaatcagtgaggcacctatctcagcgatctgtctatttcgttcatccatagttgcctgactccccgtcgtgtagataactacgatacgggagggcttaccatctggccccagtgctgcaatgataccgcgagacccacgctcaccggctccagatttatcagcaataaaccagccagccggaagggccgagcgcagaagtggtcctgcaactttatccgcctccatccagtctattaattgttgccgggaagctagagtaagtagttcgccagttaatagtttgcgcaacgttgttgccattgctacaggcatcgtggtgtcacgctcgtcgtttggtatggcttcattcagctccggttcccaacgatcaaggcgagttacatgatcccccatgttgtgcaaaaaagcggttagctccttcggtcctccgatcgttgtcagaagtaagttggccgcagtgttatcactcatggttatggcagcactgcataattctcttactgtcatgccatccgtaagatgcttttctgtgactggtgagtactcaaccaagtcattctgagaatagtgtatgcggcgaccgagttgctcttgcccggcgtcaatacgggataataccgcgccacatagcagaactttaaaagtgctcatcattggaaaacgttcttcggggcgaaaactctcaaggatcttaccgctgttgagatccagttcgatgtaacccactcgtgcacccaactgatcttcagcatcttttactttcaccagcgtttctgggtgagcaaaaacaggaaggcaaaatgccgcaaaaaagggaataagggcgacacggaaatgttgaatactcatactcttcctttttcaatattattgaagcatttatcagggttattgtctcatgagcggatacatatttgaatgtatttagaaaaataaacaaataggggttccgcgcacatttccccgaaaagtgccacctgacgtctaagaaaccattattatcatgacattaacctataaaaataggcgtatcacgaggccctttcgtcggcgcgccgcggccgc

SEQ ID NO: 658 - DNA, 4624 bp, synthetic construct
  source 1..4624: mol_type = other DNA
caactttgtatagaaaagttggagggcctatttcccatgattccttcatatttgcatatacgatacaaggctgttagagagataattggaattaatttgactgtaaacacaaagatattagtacaaaatacgtgacgtagaaagtaataatttcttgggtagtttgcagttttaaaattatgttttaaaatggactatcatatgcttaccgtaacttgaaagtatttcgatttcttggctttatatatcttgtggaaaggacgaaacaccgtgcacacctcctggcgggcagctctgctgctgctgatgctgctgctgtgttctggcaatacctgcagcagcagcaacagcagcagcagggaggcctgccctgactgcccactttttgtttttcaagtttgtacaaaaaagcaggctgggttgcgccttttccaaggcagccctgggtttgcgcagggacgcggctgctctgggcgtggttccgggaaacgcagcggcgccgaccctgggtctcgcacattcttcacgtccgttcgcagcgtcacccggatcttcgccgctacccttgtgggccccccggcgacgcttcctgctccgcccctaagtcgggaaggttccttgcggttcgcggcgtgccggacgtgacaaacggaagccgcacgtctcactagtaccctcgcagacggacagcgccagggagcaatggcagcgcgccgaccgcgatgggctgtggccaatagcggctgctcagcagggcgcgccgagagcagcggccgggaaggggcggtgcgggaggcggggtgtggggcggtagtgtgggccctgttcctgcccgcgcggtgttccgcattctgcaagcctccggagcgcacgtcggcagtcggctccctcgttgaccgaatcaccgacctctctccccaggacccagctttcttgtacaaagtgggccaccatggtgagcaagggcgaggagctgttcaccggggtggtgcccatcctggtcgagctggacggcgacgtaaacggccacaagttcagcgtgtccggcgagggcgagggcgatgccacctacggcaagctgaccctgaagttcatctgcaccaccggcaagctgcccgtgccctggcccaccctcgtgaccaccctgacctacggcgtgcagtgcttcagccgctaccccgaccacatgaagcagcacgacttcttcaagtccgccatgcccgaaggctacgtccaggagcgcaccatcttcttcaaggacgacggcaactacaagacccgcgccgaggtgaagttcgagggcgacaccctggtgaaccgcatcgagctgaagggcatcgacttcaaggaggacggcaacatcctggggcacaagctggagtacaactacaacagccacaacgtctatatcatggccgacaagcagaagaacggcatcaaggtgaacttcaagatccgccacaacatcgaggacggcagcgtgcagctcgccgaccactaccagcagaacacccccatcggcgacggccccgtgctgctgcccgacaaccactacctgagcacccagtccgccctgagcaaagaccccaacgagaagcgcgatcacatggtcctgctggagttcgtgaccgccgccgggatcactctcggcatggacgagctgtacaagggaagcggagagggcaggggaagtcttctaacatgcggggacgtggaggaaaatcccggccccatgaccgagtacaagcccacggtgcgcctcgccacccgcgacgacgtccccagggccgtacgcaccctcgccgccgcgttcgccgactaccccgccacgcgccacaccgtcgatccggaccgccacatcgagcgggtcaccgagctgcaagaactcttcctcacgcgcgtcgggctcgacatcggcaaggtgtgggtcgcggacgacggcgccgcggtggcggtctggaccacgccggagagcgtcgaagcgggggcggtgttcgccgagatcggcccgcgcatggccgagttgagcggttcccggctggccgcgcagcaacagatggaaggcctcctggcgccgcaccggcccaaggagcccgcgtggttcctggccaccgtcggcgtctcgcccgaccaccagggcaagggtctgggcagcgccgtcgtgctccccggagtggaggcggccgagcgcgccggggtgcccgccttcctggagacctccgcgccccgcaacctccccttctacgagcggctcggcttcaccgtcaccgccgacgtcgaggtgcccgaaggaccgcgcacctggtgcatgacccgcaagcccggtgcctgacaactttattatacatagttgatggccggccgcttcgagcagacatgataagatacattgatgagtttggacaaaccacaactagaatgcagtgaaaaaaatgctttatttgtgaaatttgtgatgctattgctttatttgtaaccattataagctgcaataaacaagttaacaacaacaattgcattcattttatgtttcaggttcagggggaggtgtgggaggttttttaaagcaagtaaaacctctacaaatgtggtagcggccgcggcgctcttccgcttcctcgctcactgactcgctgcgctcggtcgttcggctgcggcgagcggtatcagctcactcaaaggcggtaatacggttatccacagaatcaggggataacgcaggaaagaacatgtgagcaaaaggccagcaaaaggccaggaaccgtaaaaaggccgcgttgctggcgtttttccataggctccgcccccctgacgagcatcacaaaaatcgacgctcaagtcagaggtggcgaaacccgacaggactataaagataccaggcgtttccccctggaagctccctcgtgcgctctcctgttccgaccctgccgcttaccggatacctgtccgcctttctctcttcgggaagcgtggcgctttctcatagctcacgctgtaggtatctcagttcggtgtaggtcgttcgctccaagctgggctgtgtgcacgaaccccccgttcagcccgaccgctgcgccttatccggtaactatcgtcttgagtccaacccggtaagacacgacttatcgccactggcagcagccactggtaacaggattagcagagcgaggtatgtaggcggtgctacagagttcttgaagtggtggcctaactacggctacactagaagaacagtatttggtatctgcgctctgctgaagccagttaccttcggaaaaagagttggtagctcttgatccggcaaacaaaccaccgctggtagcggtggtttttttgtttgcaagcagcagattacgcgcagaaaaaaaggatctcaagaagatcctttgatcttttctacggggtctgacgctcagtggaacgaaaactcacgttaagggattttggtcatgagattatcaaaaaggatcttcacctagatccttttaaattaaaaatgaagttttaaatcaatctaaagtatatatgagtaaacttggtctgacagttaccaatgcttaatcagtgaggcacctatctcagcgatctgtctatttcgttcatccatagttgcctgactccccgtcgtgtagataactacgatacgggagggcttaccatctggccccagtgctgcaatgataccgcgagacccacgctcaccggctccagatttatcagcaataaaccagccagccggaagggccgagcgcagaagtggtcctgcaactttatccgcctccatccagtctattaattgttgccgggaagctagagtaagtagttcgccagttaatagtttgcgcaacgttgttgccattgctacaggcatcgtggtgtcacgctcgtcgtttggtatggcttcattcagctccggttcccaacgatcaaggcgagttacatgatcccccatgttgtgcaaaaaagcggttagctccttcggtcctccgatcgttgtcagaagtaagttggccgcagtgttatcactcatggttatggcagcactgcataattctcttactgtcatgccatccgtaagatgcttttctgtgactggtgagtactcaaccaagtcattctgagaatagtgtatgcggcgaccgagttgctcttgcccggcgtcaatacgggataataccgcgccacatagcagaactttaaaagtgctcatcattggaaaacgttcttcggggcgaaaactctcaaggatcttaccgctgttgagatccagttcgatgtaacccactcgtgcacccaactgatcttcagcatcttttactttcaccagcgtttctgggtgagcaaaaacaggaaggcaaaatgccgcaaaaaagggaataagggcgacacggaaatgttgaatactcatactcttcctttttcaatattattgaagcatttatcagggttattgtctcatgagcggatacatatttgaatgtatttagaaaaataaacaaataggggttccgcgcacatttccccgaaaagtgccacctgacgtctaagaaaccattattatcatgacattaacctataaaaataggcgtatcacgaggccctttcgtcggcgcgccgcggccgc

SEQ ID NO: 659 - DNA, 4624 bp, synthetic construct
  source 1..4624: mol_type = other DNA
caactttgtatagaaaagttggagggcctatttcccatgattccttcatatttgcatatacgatacaaggctgttagagagataattggaattaatttgactgtaaacacaaagatattagtacaaaatacgtgacgtagaaagtaataatttcttgggtagtttgcagttttaaaattatgttttaaaatggactatcatatgcttaccgtaacttgaaagtatttcgatttcttggctttatatatcttgtggaaaggacgaaacaccgtgcacacctcctggcgggcagctctgctgctgctgcagctgctgctgtgttctggcaatacctgcagcagcagcagcagcagcagcagggaggcctgccctgactgcccactttttgtttttcaagtttgtacaaaaaagcaggctgggttgcgccttttccaaggcagccctgggtttgcgcagggacgcggctgctctgggcgtggttccgggaaacgcagcggcgccgaccctgggtctcgcacattcttcacgtccgttcgcagcgtcacccggatcttcgccgctacccttgtgggccccccggcgacgcttcctgctccgcccctaagtcgggaaggttccttgcggttcgcggcgtgccggacgtgacaaacggaagccgcacgtctcactagtaccctcgcagacggacagcgccagggagcaatggcagcgcgccgaccgcgatgggctgtggccaatagcggctgctcagcagggcgcgccgagagcagcggccgggaaggggcggtgcgggaggcggggtgtggggcggtagtgtgggccctgttcctgcccgcgcggtgttccgcattctgcaagcctccggagcgcacgtcggcagtcggctccctcgttgaccgaatcaccgacctctctccccaggacccagctttcttgtacaaagtgggccaccatggtgagcaagggcgaggagctgttcaccggggtggtgcccatcctggtcgagctggacggcgacgtaaacggccacaagttcagcgtgtccggcgagggcgagggcgatgccacctacggcaagctgaccctgaagttcatctgcaccaccggcaagctgcccgtgccctggcccaccctcgtgaccaccctgacctacggcgtgcagtgcttcagccgctaccccgaccacatgaagcagcacgacttcttcaagtccgccatgcccgaaggctacgtccaggagcgcaccatcttcttcaaggacgacggcaactacaagacccgcgccgaggtgaagttcgagggcgacaccctggtgaaccgcatcgagctgaagggcatcgacttcaaggaggacggcaacatcctggggcacaagctggagtacaactacaacagccacaacgtctatatcatggccgacaagcagaagaacggcatcaaggtgaacttcaagatccgccacaacatcgaggacggcagcgtgcagctcgccgaccactaccagcagaacacccccatcggcgacggccccgtgctgctgcccgacaaccactacctgagcacccagtccgccctgagcaaagaccccaacgagaagcgcgatcacatggtcctgctggagttcgtgaccgccgccgggatcactctcggcatggacgagctgtacaagggaagcggagagggcaggggaagtcttctaacatgcggggacgtggaggaaaatcccggccccatgaccgagtacaagcccacggtgcgcctcgccacccgcgacgacgtccccagggccgtacgcaccctcgccgccgcgttcgccgactaccccgccacgcgccacaccgtcgatccggaccgccacatcgagcgggtcaccgagctgcaagaactcttcctcacgcgcgtcgggctcgacatcggcaaggtgtgggtcgcggacgacggcgccgcggtggcggtctggaccacgccggagagcgtcgaagcgggggcggtgttcgccgagatcggcccgcgcatggccgagttgagcggttcccggctggccgcgcagcaacagatggaaggcctcctggcgccgcaccggcccaaggagcccgcgtggttcctggccaccgtcggcgtctcgcccgaccaccagggcaagggtctgggcagcgccgtcgtgctccccggagtggaggcggccgagcgcgccggggtgcccgccttcctggagacctccgcgccccgcaacctccccttctacgagcggctcggcttcaccgtcaccgccgacgtcgaggtgcccgaaggaccgcgcacctggtgcatgacccgcaagcccggtgcctgacaactttattatacatagttgatggccggccgcttcgagcagacatgataagatacattgatgagtttggacaaaccacaactagaatgcagtgaaaaaaatgctttatttgtgaaatttgtgatgctattgctttatttgtaaccattataagctgcaataaacaagttaacaacaacaattgcattcattttatgtttcaggttcagggggaggtgtgggaggttttttaaagcaagtaaaacctctacaaatgtggtagcggccgcggcgctcttccgcttcctcgctcactgactcgctgcgctcggtcgttcggctgcggcgagcggtatcagctcactcaaaggcggtaatacggttatccacagaatcaggggataacgcaggaaagaacatgtgagcaaaaggccagcaaaaggccaggaaccgtaaaaaggccgcgttgctggcgtttttccataggctccgcccccctgacgagcatcacaaaaatcgacgctcaagtcagaggtggcgaaacccgacaggactataaagataccaggcgtttccccctggaagctccctcgtgcgctctcctgttccgaccctgccgcttaccggatacctgtccgcctttctctcttcgggaagcgtggcgctttctcatagctcacgctgtaggtatctcagttcggtgtaggtcgttcgctccaagctgggctgtgtgcacgaaccccccgttcagcccgaccgctgcgccttatccggtaactatcgtcttgagtccaacccggtaagacacgacttatcgccactggcagcagccactggtaacaggattagcagagcgaggtatgtaggcggtgctacagagttcttgaagtggtggcctaactacggctacactagaagaacagtatttggtatctgcgctctgctgaagccagttaccttcggaaaaagagttggtagctcttgatccggcaaacaaaccaccgctggtagcggtggtttttttgtttgcaagcagcagattacgcgcagaaaaaaaggatctcaagaagatcctttgatcttttctacggggtctgacgctcagtggaacgaaaactcacgttaagggattttggtcatgagattatcaaaaaggatcttcacctagatccttttaaattaaaaatgaagttttaaatcaatctaaagtatatatgagtaaacttggtctgacagttaccaatgcttaatcagtgaggcacctatctcagcgatctgtctatttcgttcatccatagttgcctgactccccgtcgtgtagataactacgatacgggagggcttaccatctggccccagtgctgcaatgataccgcgagacccacgctcaccggctccagatttatcagcaataaaccagccagccggaagggccgagcgcagaagtggtcctgcaactttatccgcctccatccagtctattaattgttgccgggaagctagagtaagtagttcgccagttaatagtttgcgcaacgttgttgccattgctacaggcatcgtggtgtcacgctcgtcgtttggtatggcttcattcagctccggttcccaacgatcaaggcgagttacatgatcccccatgttgtgcaaaaaagcggttagctccttcggtcctccgatcgttgtcagaagtaagttggccgcagtgttatcactcatggttatggcagcactgcataattctcttactgtcatgccatccgtaagatgcttttctgtgactggtgagtactcaaccaagtcattctgagaatagtgtatgcggcgaccgagttgctcttgcccggcgtcaatacgggataataccgcgccacatagcagaactttaaaagtgctcatcattggaaaacgttcttcggggcgaaaactctcaaggatcttaccgctgttgagatccagttcgatgtaacccactcgtgcacccaactgatcttcagcatcttttactttcaccagcgtttctgggtgagcaaaaacaggaaggcaaaatgccgcaaaaaagggaataagggcgacacggaaatgttgaatactcatactcttcctttttcaatattattgaagcatttatcagggttattgtctcatgagcggatacatatttgaatgtatttagaaaaataaacaaataggggttccgcgcacatttccccgaaaagtgccacctgacgtctaagaaaccattattatcatgacattaacctataaaaataggcgtatcacgaggccctttcgtcggcgcgccgcggccgc

SEQ ID NO: 660 - DNA, 4624 bp, synthetic construct
  source 1..4624: mol_type = other DNA
caactttgtatagaaaagttggagggcctatttcccatgattccttcatatttgcatatacgatacaaggctgttagagagataattggaattaatttgactgtaaacacaaagatattagtacaaaatacgtgacgtagaaagtaataatttcttgggtagtttgcagttttaaaattatgttttaaaatggactatcatatgcttaccgtaacttgaaagtatttcgatttcttggctttatatatcttgtggaaaggacgaaacaccgtgcacacctcctggcgggcagctctgctgctgctaatgctgctgctgtgttctggcaatacctgcagcagcagcaaaagcagcagcagggaggcctgccctgactgcccactttttgtttttcaagtttgtacaaaaaagcaggctgggttgcgccttttccaaggcagccctgggtttgcgcagggacgcggctgctctgggcgtggttccgggaaacgcagcggcgccgaccctgggtctcgcacattcttcacgtccgttcgcagcgtcacccggatcttcgccgctacccttgtgggccccccggcgacgcttcctgctccgcccctaagtcgggaaggttccttgcggttcgcggcgtgccggacgtgacaaacggaagccgcacgtctcactagtaccctcgcagacggacagcgccagggagcaatggcagcgcgccgaccgcgatgggctgtggccaatagcggctgctcagcagggcgcgccgagagcagcggccgggaaggggcggtgcgggaggcggggtgtggggcggtagtgtgggccctgttcctgcccgcgcggtgttccgcattctgcaagcctccggagcgcacgtcggcagtcggctccctcgttgaccgaatcaccgacctctctccccaggacccagctttcttgtacaaagtgggccaccatggtgagcaagggcgaggagctgttcaccggggtggtgcccatcctggtcgagctggacggcgacgtaaacggccacaagttcagcgtgtccggcgagggcgagggcgatgccacctacggcaagctgaccctgaagttcatctgcaccaccggcaagctgcccgtgccctggcccaccctcgtgaccaccctgacctacggcgtgcagtgcttcagccgctaccccgaccacatgaagcagcacgacttcttcaagtccgccatgcccgaaggctacgtccaggagcgcaccatcttcttcaaggacgacggcaactacaagacccgcgccgaggtgaagttcgagggcgacaccctggtgaaccgcatcgagctgaagggcatcgacttcaaggaggacggcaacatcctggggcacaagctggagtacaactacaacagccacaacgtctatatcatggccgacaagcagaagaacggcatcaaggtgaacttcaagatccgccacaacatcgaggacggcagcgtgcagctcgccgaccactaccagcagaacacccccatcggcgacggccccgtgctgctgcccgacaaccactacctgagcacccagtccgccctgagcaaagaccccaacgagaagcgcgatcacatggtcctgctggagttcgtgaccgccgccgggatcactctcggcatggacgagctgtacaagggaagcggagagggcaggggaagtcttctaacatgcggggacgtggaggaaaatcccggccccatgaccgagtacaagcccacggtgcgcctcgccacccgcgacgacgtccccagggccgtacgcaccctcgccgccgcgttcgccgactaccccgccacgcgccacaccgtcgatccggaccgccacatcgagcgggtcaccgagctgcaagaactcttcctcacgcgcgtcgggctcgacatcggcaaggtgtgggtcgcggacgacggcgccgcggtggcggtctggaccacgccggagagcgtcgaagcgggggcggtgttcgccgagatcggcccgcgcatggccgagttgagcggttcccggctggccgcgcagcaacagatggaaggcctcctggcgccgcaccggcccaaggagcccgcgtggttcctggccaccgtcggcgtctcgcccgaccaccagggcaagggtctgggcagcgccgtcgtgctccccggagtggaggcggccgagcgcgccggggtgcccgccttcctggagacctccgcgccccgcaacctccccttctacgagcggctcggcttcaccgtcaccgccgacgtcgaggtgcccgaaggaccgcgcacctggtgcatgacccgcaagcccggtgcctgacaactttattatacatagttgatggccggccgcttcgagcagacatgataagatacattgatgagtttggacaaaccacaactagaatgcagtgaaaaaaatgctttatttgtgaaatttgtgatgctattgctttatttgtaaccattataagctgcaataaacaagttaacaacaacaattgcattcattttatgtttcaggttcagggggaggtgtgggaggttttttaaagcaagtaaaacctctacaaatgtggtagcggccgcggcgctcttccgcttcctcgctcactgactcgctgcgctcggtcgttcggctgcggcgagcggtatcagctcactcaaaggcggtaatacggttatccacagaatcaggggataacgcaggaaagaacatgtgagcaaaaggccagcaaaaggccaggaaccgtaaaaaggccgcgttgctggcgtttttccataggctccgcccccctgacgagcatcacaaaaatcgacgctcaagtcagaggtggcgaaacccgacaggactataaagataccaggcgtttccccctggaagctccctcgtgcgctctcctgttccgaccctgccgcttaccggatacctgtccgcctttctctcttcgggaagcgtggcgctttctcatagctcacgctgtaggtatctcagttcggtgtaggtcgttcgctccaagctgggctgtgtgcacgaaccccccgttcagcccgaccgctgcgccttatccggtaactatcgtcttgagtccaacccggtaagacacgacttatcgccactggcagcagccactggtaacaggattagcagagcgaggtatgtaggcggtgctacagagttcttgaagtggtggcctaactacggctacactagaagaacagtatttggtatctgcgctctgctgaagccagttaccttcggaaaaagagttggtagctcttgatccggcaaacaaaccaccgctggtagcggtggtttttttgtttgcaagcagcagattacgcgcagaaaaaaaggatctcaagaagatcctttgatcttttctacggggtctgacgctcagtggaacgaaaactcacgttaagggattttggtcatgagattatcaaaaaggatcttcacctagatccttttaaattaaaaatgaagttttaaatcaatctaaagtatatatgagtaaacttggtctgacagttaccaatgcttaatcagtgaggcacctatctcagcgatctgtctatttcgttcatccatagttgcctgactccccgtcgtgtagataactacgatacgggagggcttaccatctggccccagtgctgcaatgataccgcgagacccacgctcaccggctccagatttatcagcaataaaccagccagccggaagggccgagcgcagaagtggtcctgcaactttatccgcctccatccagtctattaattgttgccgggaagctagagtaagtagttcgccagttaatagtttgcgcaacgttgttgccattgctacaggcatcgtggtgtcacgctcgtcgtttggtatggcttcattcagctccggttcccaacgatcaaggcgagttacatgatcccccatgttgtgcaaaaaagcggttagctccttcggtcctccgatcgttgtcagaagtaagttggccgcagtgttatcactcatggttatggcagcactgcataattctcttactgtcatgccatccgtaagatgcttttctgtgactggtgagtactcaaccaagtcattctgagaatagtgtatgcggcgaccgagttgctcttgcccggcgtcaatacgggataataccgcgccacatagcagaactttaaaagtgctcatcattggaaaacgttcttcggggcgaaaactctcaaggatcttaccgctgttgagatccagttcgatgtaacccactcgtgcacccaactgatcttcagcatcttttactttcaccagcgtttctgggtgagcaaaaacaggaaggcaaaatgccgcaaaaaagggaataagggcgacacggaaatgttgaatactcatactcttcctttttcaatattattgaagcatttatcagggttattgtctcatgagcggatacatatttgaatgtatttagaaaaataaacaaataggggttccgcgcacatttccccgaaaagtgccacctgacgtctaagaaaccattattatcatgacattaacctataaaaataggcgtatcacgaggccctttcgtcggcgcgccgcggccgc

SEQ ID NO: 661 - DNA, 4624 bp, synthetic construct
  source 1..4624: mol_type = other DNA
caactttgtatagaaaagttggagggcctatttcccatgattccttcatatttgcatatacgatacaaggctgttagagagataattggaattaatttgactgtaaacacaaagatattagtacaaaatacgtgacgtagaaagtaataatttcttgggtagtttgcagttttaaaattatgttttaaaatggactatcatatgcttaccgtaacttgaaagtatttcgatttcttggctttatatatcttgtggaaaggacgaaacaccgtgcacacctcctggcgggcagctctgctgctgctacagctgctgctgtgttctggcaatacctgcagcagcagcagaagcagcagcagggaggcctgccctgactgcccactttttgtttttcaagtttgtacaaaaaagcaggctgggttgcgccttttccaaggcagccctgggtttgcgcagggacgcggctgctctgggcgtggttccgggaaacgcagcggcgccgaccctgggtctcgcacattcttcacgtccgttcgcagcgtcacccggatcttcgccgctacccttgtgggccccccggcgacgcttcctgctccgcccctaagtcgggaaggttccttgcggttcgcggcgtgccggacgtgacaaacggaagccgcacgtctcactagtaccctcgcagacggacagcgccagggagcaatggcagcgcgccgaccgcgatgggctgtggccaatagcggctgctcagcagggcgcgccgagagcagcggccgggaaggggcggtgcgggaggcggggtgtggggcggtagtgtgggccctgttcctgcccgcgcggtgttccgcattctgcaagcctccggagcgcacgtcggcagtcggctccctcgttgaccgaatcaccgacctctctccccaggacccagctttcttgtacaaagtgggccaccatggtgagcaagggcgaggagctgttcaccggggtggtgcccatcctggtcgagctggacggcgacgtaaacggccacaagttcagcgtgtccggcgagggcgagggcgatgccacctacggcaagctgaccctgaagttcatctgcaccaccggcaagctgcccgtgccctggcccaccctcgtgaccaccctgacctacggcgtgcagtgcttcagccgctaccccgaccacatgaagcagcacgacttcttcaagtccgccatgcccgaaggctacgtccaggagcgcaccatcttcttcaaggacgacggcaactacaagacccgcgccgaggtgaagttcgagggcgacaccctggtgaaccgcatcgagctgaagggcatcgacttcaaggaggacggcaacatcctggggcacaagctggagtacaactacaacagccacaacgtctatatcatggccgacaagcagaagaacggcatcaaggtgaacttcaagatccgccacaacatcgaggacggcagcgtgcagctcgccgaccactaccagcagaacacccccatcggcgacggccccgtgctgctgcccgacaaccactacctgagcacccagtccgccctgagcaaagaccccaacgagaagcgcgatcacatggtcctgctggagttcgtgaccgccgccgggatcactctcggcatggacgagctgtacaagggaagcggagagggcaggggaagtcttctaacatgcggggacgtggaggaaaatcccggccccatgaccgagtacaagcccacggtgcgcctcgccacccgcgacgacgtccccagggccgtacgcaccctcgccgccgcgttcgccgactaccccgccacgcgccacaccgtcgatccggaccgccacatcgagcgggtcaccgagctgcaagaactcttcctcacgcgcgtcgggctcgacatcggcaaggtgtgggtcgcggacgacggcgccgcggtggcggtctggaccacgccggagagcgtcgaagcgggggcggtgttcgccgagatcggcccgcgcatggccgagttgagcggttcccggctggccgcgcagcaacagatggaaggcctcctggcgccgcaccggcccaaggagcccgcgtggttcctggccaccgtcggcgtctcgcccgaccaccagggcaagggtctgggcagcgccgtcgtgctccccggagtggaggcggccgagcgcgccggggtgcccgccttcctggagacctccgcgccccgcaacctccccttctacgagcggctcggcttcaccgtcaccgccgacgtcgaggtgcccgaaggaccgcgcacctggtgcatgacccgcaagcccggtgcctgacaactttattatacatagttgatggccggccgcttcgagcagacatgataagatacattgatgagtttggacaaaccacaactagaatgcagtgaaaaaaatgctttatttgtgaaatttgtgatgctattgctttatttgtaaccattataagctgcaataaacaagttaacaacaacaattgcattcattttatgtttcaggttcagggggaggtgtgggaggttttttaaagcaagtaaaacctctacaaatgtggtagcggccgcggcgctcttccgcttcctcgctcactgactcgctgcgctcggtcgttcggctgcggcgagcggtatcagctcactcaaaggcggtaatacggttatccacagaatcaggggataacgcaggaaagaacatgtgagcaaaaggccagcaaaaggccaggaaccgtaaaaaggccgcgttgctggcgtttttccataggctccgcccccctgacgagcatcacaaaaatcgacgctcaagtcagaggtggcgaaacccgacaggactataaagataccaggcgtttccccctggaagctccctcgtgcgctctcctgttccgaccctgccgcttaccggatacctgtccgcctttctctcttcgggaagcgtggcgctttctcatagctcacgctgtaggtatctcagttcggtgtaggtcgttcgctccaagctgggctgtgtgcacgaaccccccgttcagcccgaccgctgcgccttatccggtaactatcgtcttgagtccaacccggtaagacacgacttatcgccactggcagcagccactggtaacaggattagcagagcgaggtatgtaggcggtgctacagagttcttgaagtggtggcctaactacggctacactagaagaacagtatttggtatctgcgctctgctgaagccagttaccttcggaaaaagagttggtagctcttgatccggcaaacaaaccaccgctggtagcggtggtttttttgtttgcaagcagcagattacgcgcagaaaaaaaggatctcaagaagatcctttgatcttttctacggggtctgacgctcagtggaacgaaaactcacgttaagggattttggtcatgagattatcaaaaaggatcttcacctagatccttttaaattaaaaatgaagttttaaatcaatctaaagtatatatgagtaaacttggtctgacagttaccaatgcttaatcagtgaggcacctatctcagcgatctgtctatttcgttcatccatagttgcctgactccccgtcgtgtagataactacgatacgggagggcttaccatctggccccagtgctgcaatgataccgcgagacccacgctcaccggctccagatttatcagcaataaaccagccagccggaagggccgagcgcagaagtggtcctgcaactttatccgcctccatccagtctattaattgttgccgggaagctagagtaagtagttcgccagttaatagtttgcgcaacgttgttgccattgctacaggcatcgtggtgtcacgctcgtcgtttggtatggcttcattcagctccggttcccaacgatcaaggcgagttacatgatcccccatgttgtgcaaaaaagcggttagctccttcggtcctccgatcgttgtcagaagtaagttggccgcagtgttatcactcatggttatggcagcactgcataattctcttactgtcatgccatccgtaagatgcttttctgtgactggtgagtactcaaccaagtcattctgagaatagtgtatgcggcgaccgagttgctcttgcccggcgtcaatacgggataataccgcgccacatagcagaactttaaaagtgctcatcattggaaaacgttcttcggggcgaaaactctcaaggatcttaccgctgttgagatccagttcgatgtaacccactcgtgcacccaactgatcttcagcatcttttactttcaccagcgtttctgggtgagcaaaaacaggaaggcaaaatgccgcaaaaaagggaataagggcgacacggaaatgttgaatactcatactcttcctttttcaatattattgaagcatttatcagggttattgtctcatgagcggatacatatttgaatgtatttagaaaaataaacaaataggggttccgcgcacatttccccgaaaagtgccacctgacgtctaagaaaccattattatcatgacattaacctataaaaataggcgtatcacgaggccctttcgtcggcgcgccgcggccgc

SEQ ID NO: 662 - DNA, 4624 bp, synthetic construct
  source 1..4624: mol_type = other DNA
caactttgtatagaaaagttggagggcctatttcccatgattccttcatatttgcatatacgatacaaggctgttagagagataattggaattaatttgactgtaaacacaaagatattagtacaaaatacgtgacgtagaaagtaataatttcttgggtagtttgcagttttaaaattatgttttaaaatggactatcatatgcttaccgtaacttgaaagtatttcgatttcttggctttatatatcttgtggaaaggacgaaacaccgtgcacacctcctggcgggcagctctgctgctgctactactgctgctgtgttctggcaatacctgcagcagcagaagaagcagcagcagggaggcctgccctgactgcccactttttgtttttcaagtttgtacaaaaaagcaggctgggttgcgccttttccaaggcagccctgggtttgcgcagggacgcggctgctctgggcgtggttccgggaaacgcagcggcgccgaccctgggtctcgcacattcttcacgtccgttcgcagcgtcacccggatcttcgccgctacccttgtgggccccccggcgacgcttcctgctccgcccctaagtcgggaaggttccttgcggttcgcggcgtgccggacgtgacaaacggaagccgcacgtctcactagtaccctcgcagacggacagcgccagggagcaatggcagcgcgccgaccgcgatgggctgtggccaatagcggctgctcagcagggcgcgccgagagcagcggccgggaaggggcggtgcgggaggcggggtgtggggcggtagtgtgggccctgttcctgcccgcgcggtgttccgcattctgcaagcctccggagcgcacgtcggcagtcggctccctcgttgaccgaatcaccgacctctctccccaggacccagctttcttgtacaaagtgggccaccatggtgagcaagggcgaggagctgttcaccggggtggtgcccatcctggtcgagctggacggcgacgtaaacggccacaagttcagcgtgtccggcgagggcgagggcgatgccacctacggcaagctgaccctgaagttcatctgcaccaccggcaagctgcccgtgccctggcccaccctcgtgaccaccctgacctacggcgtgcagtgcttcagccgctaccccgaccacatgaagcagcacgacttcttcaagtccgccatgcccgaaggctacgtccaggagcgcaccatcttcttcaaggacgacggcaactacaagacccgcgccgaggtgaagttcgagggcgacaccctggtgaaccgcatcgagctgaagggcatcgacttcaaggaggacggcaacatcctggggcacaagctggagtacaactacaacagccacaacgtctatatcatggccgacaagcagaagaacggcatcaaggtgaacttcaagatccgccacaacatcgaggacggcagcgtgcagctcgccgaccactaccagcagaacacccccatcggcgacggccccgtgctgctgcccgacaaccactacctgagcacccagtccgccctgagcaaagaccccaacgagaagcgcgatcacatggtcctgctggagttcgtgaccgccgccgggatcactctcggcatggacgagctgtacaagggaagcggagagggcaggggaagtcttctaacatgcggggacgtggaggaaaatcccggccccatgaccgagtacaagcccacggtgcgcctcgccacccgcgacgacgtccccagggccgtacgcaccctcgccgccgcgttcgccgactaccccgccacgcgccacaccgtcgatccggaccgccacatcgagcgggtcaccgagctgcaagaactcttcctcacgcgcgtcgggctcgacatcggcaaggtgtgggtcgcggacgacggcgccgcggtggcggtctggaccacgccggagagcgtcgaagcgggggcggtgttcgccgagatcggcccgcgcatggccgagttgagcggttcccggctggccgcgcagcaacagatggaaggcctcctggcgccgcaccggcccaaggagcccgcgtggttcctggccaccgtcggcgtctcgcccgaccaccagggcaagggtctgggcagcgccgtcgtgctccccggagtggaggcggccgagcgcgccggggtgcccgccttcctggagacctccgcgccccgcaacctccccttctacgagcggctcggcttcaccgtcaccgccgacgtcgaggtgcccgaaggaccgcgcacctggtgcatgacccgcaagcccggtgcctgacaactttattatacatagttgatggccggccgcttcgagcagacatgataagatacattgatgagtttggacaaaccacaactagaatgcagtgaaaaaaatgctttatttgtgaaatttgtgatgctattgctttatttgtaaccattataagctgcaataaacaagttaacaacaacaattgcattcattttatgtttcaggttcagggggaggtgtgggaggttttttaaagcaagtaaaacctctacaaatgtggtagcggccgcggcgctcttccgcttcctcgctcactgactcgctgcgctcggtcgttcggctgcggcgagcggtatcagctcactcaaaggcggtaatacggttatccacagaatcaggggataacgcaggaaagaacatgtgagcaaaaggccagcaaaaggccaggaaccgtaaaaaggccgcgttgctggcgtttttccataggctccgcccccctgacgagcatcacaaaaatcgacgctcaagtcagaggtggcgaaacccgacaggactataaagataccaggcgtttccccctggaagctccctcgtgcgctctcctgttccgaccctgccgcttaccggatacctgtccgcctttctctcttcgggaagcgtggcgctttctcatagctcacgctgtaggtatctcagttcggtgtaggtcgttcgctccaagctgggctgtgtgcacgaaccccccgttcagcccgaccgctgcgccttatccggtaactatcgtcttgagtccaacccggtaagacacgacttatcgccactggcagcagccactggtaacaggattagcagagcgaggtatgtaggcggtgctacagagttcttgaagtggtggcctaactacggctacactagaagaacagtatttggtatctgcgctctgctgaagccagttaccttcggaaaaagagttggtagctcttgatccggcaaacaaaccaccgctggtagcggtggtttttttgtttgcaagcagcagattacgcgcagaaaaaaaggatctcaagaagatcctttgatcttttctacggggtctgacgctcagtggaacgaaaactcacgttaagggattttggtcatgagattatcaaaaaggatcttcacctagatccttttaaattaaaaatgaagttttaaatcaatctaaagtatatatgagtaaacttggtctgacagttaccaatgcttaatcagtgaggcacctatctcagcgatctgtctatttcgttcatccatagttgcctgactccccgtcgtgtagataactacgatacgggagggcttaccatctggccccagtgctgcaatgataccgcgagacccacgctcaccggctccagatttatcagcaataaaccagccagccggaagggccgagcgcagaagtggtcctgcaactttatccgcctccatccagtctattaattgttgccgggaagctagagtaagtagttcgccagttaatagtttgcgcaacgttgttgccattgctacaggcatcgtggtgtcacgctcgtcgtttggtatggcttcattcagctccggttcccaacgatcaaggcgagttacatgatcccccatgttgtgcaaaaaagcggttagctccttcggtcctccgatcgttgtcagaagtaagttggccgcagtgttatcactcatggttatggcagcactgcataattctcttactgtcatgccatccgtaagatgcttttctgtgactggtgagtactcaaccaagtcattctgagaatagtgtatgcggcgaccgagttgctcttgcccggcgtcaatacgggataataccgcgccacatagcagaactttaaaagtgctcatcattggaaaacgttcttcggggcgaaaactctcaaggatcttaccgctgttgagatccagttcgatgtaacccactcgtgcacccaactgatcttcagcatcttttactttcaccagcgtttctgggtgagcaaaaacaggaaggcaaaatgccgcaaaaaagggaataagggcgacacggaaatgttgaatactcatactcttcctttttcaatattattgaagcatttatcagggttattgtctcatgagcggatacatatttgaatgtatttagaaaaataaacaaataggggttccgcgcacatttccccgaaaagtgccacctgacgtctaagaaaccattattatcatgacattaacctataaaaataggcgtatcacgaggccctttcgtcggcgcgccgcggccgc

SEQ ID NO: 663 - DNA, 4624 bp, synthetic construct
  source 1..4624: mol_type = other DNA
caactttgtatagaaaagttggagggcctatttcccatgattccttcatatttgcatatacgatacaaggctgttagagagataattggaattaatttgactgtaaacacaaagatattagtacaaaatacgtgacgtagaaagtaataatttcttgggtagtttgcagttttaaaattatgttttaaaatggactatcatatgcttaccgtaacttgaaagtatttcgatttcttggctttatatatcttgtggaaaggacgaaacaccgtgcacacctcctggcgggcagctctgctgctgctactgatgctgctgtgttctggcaatacctgcagcagcaacagaagcagcagcagggaggcctgccctgactgcccactttttgtttttcaagtttgtacaaaaaagcaggctgggttgcgccttttccaaggcagccctgggtttgcgcagggacgcggctgctctgggcgtggttccgggaaacgcagcggcgccgaccctgggtctcgcacattcttcacgtccgttcgcagcgtcacccggatcttcgccgctacccttgtgggccccccggcgacgcttcctgctccgcccctaagtcgggaaggttccttgcggttcgcggcgtgccggacgtgacaaacggaagccgcacgtctcactagtaccctcgcagacggacagcgccagggagcaatggcagcgcgccgaccgcgatgggctgtggccaatagcggctgctcagcagggcgcgccgagagcagcggccgggaaggggcggtgcgggaggcggggtgtggggcggtagtgtgggccctgttcctgcccgcgcggtgttccgcattctgcaagcctccggagcgcacgtcggcagtcggctccctcgttgaccgaatcaccgacctctctccccaggacccagctttcttgtacaaagtgggccaccatggtgagcaagggcgaggagctgttcaccggggtggtgcccatcctggtcgagctggacggcgacgtaaacggccacaagttcagcgtgtccggcgagggcgagggcgatgccacctacggcaagctgaccctgaagttcatctgcaccaccggcaagctgcccgtgccctggcccaccctcgtgaccaccctgacctacggcgtgcagtgcttcagccgctaccccgaccacatgaagcagcacgacttcttcaagtccgccatgcccgaaggctacgtccaggagcgcaccatcttcttcaaggacgacggcaactacaagacccgcgccgaggtgaagttcgagggcgacaccctggtgaaccgcatcgagctgaagggcatcgacttcaaggaggacggcaacatcctggggcacaagctggagtacaactacaacagccacaacgtctatatcatggccgacaagcagaagaacggcatcaaggtgaacttcaagatccgccacaacatcgaggacggcagcgtgcagctcgccgaccactaccagcagaacacccccatcggcgacggccccgtgctgctgcccgacaaccactacctgagcacccagtccgccctgagcaaagaccccaacgagaagcgcgatcacatggtcctgctggagttcgtgaccgccgccgggatcactctcggcatggacgagctgtacaagggaagcggagagggcaggggaagtcttctaacatgcggggacgtggaggaaaatcccggccccatgaccgagtacaagcccacggtgcgcctcgccacccgcgacgacgtccccagggccgtacgcaccctcgccgccgcgttcgccgactaccccgccacgcgccacaccgtcgatccggaccgccacatcgagcgggtcaccgagctgcaagaactcttcctcacgcgcgtcgggctcgacatcggcaaggtgtgggtcgcggacgacggcgccgcggtggcggtctggaccacgccggagagcgtcgaagcgggggcggtgttcgccgagatcggcccgcgcatggccgagttgagcggttcccggctggccgcgcagcaacagatggaaggcctcctggcgccgcaccggcccaaggagcccgcgtggttcctggccaccgtcggcgtctcgcccgaccaccagggcaagggtctgggcagcgccgtcgtgctccccggagtggaggcggccgagcgcgccggggtgcccgccttcctggagacctccgcgccccgcaacctccccttctacgagcggctcggcttcaccgtcaccgccgacgtcgaggtgcccgaaggaccgcgcacctggtgcatgacccgcaagcccggtgcctgacaactttattatacatagttgatggccggccgcttcgagcagacatgataagatacattgatgagtttggacaaaccacaactagaatgcagtgaaaaaaatgctttatttgtgaaatttgtgatgctattgctttatttgtaaccattataagctgcaataaacaagttaacaacaacaattgcattcattttatgtttcaggttcagggggaggtgtgggaggttttttaaagcaagtaaaacctctacaaatgtggtagcggccgcggcgctcttccgcttcctcgctcactgactcgctgcgctcggtcgttcggctgcggcgagcggtatcagctcactcaaaggcggtaatacggttatccacagaatcaggggataacgcaggaaagaacatgtgagcaaaaggccagcaaaaggccaggaaccgtaaaaaggccgcgttgctggcgtttttccataggctccgcccccctgacgagcatcacaaaaatcgacgctcaagtcagaggtggcgaaacccgacaggactataaagataccaggcgtttccccctggaagctccctcgtgcgctctcctgttccgaccctgccgcttaccggatacctgtccgcctttctctcttcgggaagcgtggcgctttctcatagctcacgctgtaggtatctcagttcggtgtaggtcgttcgctccaagctgggctgtgtgcacgaaccccccgttcagcccgaccgctgcgccttatccggtaactatcgtcttgagtccaacccggtaagacacgacttatcgccactggcagcagccactggtaacaggattagcagagcgaggtatgtaggcggtgctacagagttcttgaagtggtggcctaactacggctacactagaagaacagtatttggtatctgcgctctgctgaagccagttaccttcggaaaaagagttggtagctcttgatccggcaaacaaaccaccgctggtagcggtggtttttttgtttgcaagcagcagattacgcgcagaaaaaaaggatctcaagaagatcctttgatcttttctacggggtctgacgctcagtggaacgaaaactcacgttaagggattttggtcatgagattatcaaaaaggatcttcacctagatccttttaaattaaaaatgaagttttaaatcaatctaaagtatatatgagtaaacttggtctgacagttaccaatgcttaatcagtgaggcacctatctcagcgatctgtctatttcgttcatccatagttgcctgactccccgtcgtgtagataactacgatacgggagggcttaccatctggccccagtgctgcaatgataccgcgagacccacgctcaccggctccagatttatcagcaataaaccagccagccggaagggccgagcgcagaagtggtcctgcaactttatccgcctccatccagtctattaattgttgccgggaagctagagtaagtagttcgccagttaatagtttgcgcaacgttgttgccattgctacaggcatcgtggtgtcacgctcgtcgtttggtatggcttcattcagctccggttcccaacgatcaaggcgagttacatgatcccccatgttgtgcaaaaaagcggttagctccttcggtcctccgatcgttgtcagaagtaagttggccgcagtgttatcactcatggttatggcagcactgcataattctcttactgtcatgccatccgtaagatgcttttctgtgactggtgagtactcaaccaagtcattctgagaatagtgtatgcggcgaccgagttgctcttgcccggcgtcaatacgggataataccgcgccacatagcagaactttaaaagtgctcatcattggaaaacgttcttcggggcgaaaactctcaaggatcttaccgctgttgagatccagttcgatgtaacccactcgtgcacccaactgatcttcagcatcttttactttcaccagcgtttctgggtgagcaaaaacaggaaggcaaaatgccgcaaaaaagggaataagggcgacacggaaatgttgaatactcatactcttcctttttcaatattattgaagcatttatcagggttattgtctcatgagcggatacatatttgaatgtatttagaaaaataaacaaataggggttccgcgcacatttccccgaaaagtgccacctgacgtctaagaaaccattattatcatgacattaacctataaaaataggcgtatcacgaggccctttcgtcggcgcgccgcggccgc

SEQ ID NO: 664 - DNA, 4624 bp, synthetic construct
  source 1..4624: mol_type = other DNA
caactttgtatagaaaagttggagggcctatttcccatgattccttcatatttgcatatacgatacaaggctgttagagagataattggaattaatttgactgtaaacacaaagatattagtacaaaatacgtgacgtagaaagtaataatttcttgggtagtttgcagttttaaaattatgttttaaaatggactatcatatgcttaccgtaacttgaaagtatttcgatttcttggctttatatatcttgtggaaaggacgaaacaccgtgcacacctcctggcgggcagctctgctgctgctactgcagctgctgtgttctggcaatacctgcagcagcagcagaagcagcagcagggaggcctgccctgactgcccactttttgtttttcaagtttgtacaaaaaagcaggctgggttgcgccttttccaaggcagccctgggtttgcgcagggacgcggctgctctgggcgtggttccgggaaacgcagcggcgccgaccctgggtctcgcacattcttcacgtccgttcgcagcgtcacccggatcttcgccgctacccttgtgggccccccggcgacgcttcctgctccgcccctaagtcgggaaggttccttgcggttcgcggcgtgccggacgtgacaaacggaagccgcacgtctcactagtaccctcgcagacggacagcgccagggagcaatggcagcgcgccgaccgcgatgggctgtggccaatagcggctgctcagcagggcgcgccgagagcagcggccgggaaggggcggtgcgggaggcggggtgtggggcggtagtgtgggccctgttcctgcccgcgcggtgttccgcattctgcaagcctccggagcgcacgtcggcagtcggctccctcgttgaccgaatcaccgacctctctccccaggacccagctttcttgtacaaagtgggccaccatggtgagcaagggcgaggagctgttcaccggggtggtgcccatcctggtcgagctggacggcgacgtaaacggccacaagttcagcgtgtccggcgagggcgagggcgatgccacctacggcaagctgaccctgaagttcatctgcaccaccggcaagctgcccgtgccctggcccaccctcgtgaccaccctgacctacggcgtgcagtgcttcagccgctaccccgaccacatgaagcagcacgacttcttcaagtccgccatgcccgaaggctacgtccaggagcgcaccatcttcttcaaggacgacggcaactacaagacccgcgccgaggtgaagttcgagggcgacaccctggtgaaccgcatcgagctgaagggcatcgacttcaaggaggacggcaacatcctggggcacaagctggagtacaactacaacagccacaacgtctatatcatggccgacaagcagaagaacggcatcaaggtgaacttcaagatccgccacaacatcgaggacggcagcgtgcagctcgccgaccactaccagcagaacacccccatcggcgacggccccgtgctgctgcccgacaaccactacctgagcacccagtccgccctgagcaaagaccccaacgagaagcgcgatcacatggtcctgctggagttcgtgaccgccgccgggatcactctcggcatggacgagctgtacaagggaagcggagagggcaggggaagtcttctaacatgcggggacgtggaggaaaatcccggccccatgaccgagtacaagcccacggtgcgcctcgccacccgcgacgacgtccccagggccgtacgcaccctcgccgccgcgttcgccgactaccccgccacgcgccacaccgtcgatccggaccgccacatcgagcgggtcaccgagctgcaagaactcttcctcacgcgcgtcgggctcgacatcggcaaggtgtgggtcgcggacgacggcgccgcggtggcggtctggaccacgccggagagcgtcgaagcgggggcggtgttcgccgagatcggcccgcgcatggccgagttgagcggttcccggctggccgcgcagcaacagatggaaggcctcctggcgccgcaccggcccaaggagcccgcgtggttcctggccaccgtcggcgtctcgcccgaccaccagggcaagggtctgggcagcgccgtcgtgctccccggagtggaggcggccgagcgcgccggggtgcccgccttcctggagacctccgcgccccgcaacctccccttctacgagcggctcggcttcaccgtcaccgccgacgtcgaggtgcccgaaggaccgcgcacctggtgcatgacccgcaagcccggtgcctgacaactttattatacatagttgatggccggccgcttcgagcagacatgataagatacattgatgagtttggacaaaccacaactagaatgcagtgaaaaaaatgctttatttgtgaaatttgtgatgctattgctttatttgtaaccattataagctgcaataaacaagttaacaacaacaattgcattcattttatgtttcaggttcagggggaggtgtgggaggttttttaaagcaagtaaaacctctacaaatgtggtagcggccgcggcgctcttccgcttcctcgctcactgactcgctgcgctcggtcgttcggctgcggcgagcggtatcagctcactcaaaggcggtaatacggttatccacagaatcaggggataacgcaggaaagaacatgtgagcaaaaggccagcaaaaggccaggaaccgtaaaaaggccgcgttgctggcgtttttccataggctccgcccccctgacgagcatcacaaaaatcgacgctcaagtcagaggtggcgaaacccgacaggactataaagataccaggcgtttccccctggaagctccctcgtgcgctctcctgttccgaccctgccgcttaccggatacctgtccgcctttctctcttcgggaagcgtggcgctttctcatagctcacgctgtaggtatctcagttcggtgtaggtcgttcgctccaagctgggctgtgtgcacgaaccccccgttcagcccgaccgctgcgccttatccggtaactatcgtcttgagtccaacccggtaagacacgacttatcgccactggcagcagccactggtaacaggattagcagagcgaggtatgtaggcggtgctacagagttcttgaagtggtggcctaactacggctacactagaagaacagtatttggtatctgcgctctgctgaagccagttaccttcggaaaaagagttggtagctcttgatccggcaaacaaaccaccgctggtagcggtggtttttttgtttgcaagcagcagattacgcgcagaaaaaaaggatctcaagaagatcctttgatcttttctacggggtctgacgctcagtggaacgaaaactcacgttaagggattttggtcatgagattatcaaaaaggatcttcacctagatccttttaaattaaaaatgaagttttaaatcaatctaaagtatatatgagtaaacttggtctgacagttaccaatgcttaatcagtgaggcacctatctcagcgatctgtctatttcgttcatccatagttgcctgactccccgtcgtgtagataactacgatacgggagggcttaccatctggccccagtgctgcaatgataccgcgagacccacgctcaccggctccagatttatcagcaataaaccagccagccggaagggccgagcgcagaagtggtcctgcaactttatccgcctccatccagtctattaattgttgccgggaagctagagtaagtagttcgccagttaatagtttgcgcaacgttgttgccattgctacaggcatcgtggtgtcacgctcgtcgtttggtatggcttcattcagctccggttcccaacgatcaaggcgagttacatgatcccccatgttgtgcaaaaaagcggttagctccttcggtcctccgatcgttgtcagaagtaagttggccgcagtgttatcactcatggttatggcagcactgcataattctcttactgtcatgccatccgtaagatgcttttctgtgactggtgagtactcaaccaagtcattctgagaatagtgtatgcggcgaccgagttgctcttgcccggcgtcaatacgggataataccgcgccacatagcagaactttaaaagtgctcatcattggaaaacgttcttcggggcgaaaactctcaaggatcttaccgctgttgagatccagttcgatgtaacccactcgtgcacccaactgatcttcagcatcttttactttcaccagcgtttctgggtgagcaaaaacaggaaggcaaaatgccgcaaaaaagggaataagggcgacacggaaatgttgaatactcatactcttcctttttcaatattattgaagcatttatcagggttattgtctcatgagcggatacatatttgaatgtatttagaaaaataaacaaataggggttccgcgcacatttccccgaaaagtgccacctgacgtctaagaaaccattattatcatgacattaacctataaaaataggcgtatcacgaggccctttcgtcggcgcgccgcggccgc

SEQ ID NO: 665 - DNA, 4624 bp, synthetic construct
  source 1..4624: mol_type = other DNA
caactttgtatagaaaagttggagggcctatttcccatgattccttcatatttgcatatacgatacaaggctgttagagagataattggaattaatttgactgtaaacacaaagatattagtacaaaatacgtgacgtagaaagtaataatttcttgggtagtttgcagttttaaaattatgttttaaaatggactatcatatgcttaccgtaacttgaaagtatttcgatttcttggctttatatatcttgtggaaaggacgaaacaccgtgcacacctcctggcgggcagctctgctgctgctactgctactgctgtgttctggcaatacctgcagcagaagcagaagcagcagcagggaggcctgccctgactgcccactttttgtttttcaagtttgtacaaaaaagcaggctgggttgcgccttttccaaggcagccctgggtttgcgcagggacgcggctgctctgggcgtggttccgggaaacgcagcggcgccgaccctgggtctcgcacattcttcacgtccgttcgcagcgtcacccggatcttcgccgctacccttgtgggccccccggcgacgcttcctgctccgcccctaagtcgggaaggttccttgcggttcgcggcgtgccggacgtgacaaacggaagccgcacgtctcactagtaccctcgcagacggacagcgccagggagcaatggcagcgcgccgaccgcgatgggctgtggccaatagcggctgctcagcagggcgcgccgagagcagcggccgggaaggggcggtgcgggaggcggggtgtggggcggtagtgtgggccctgttcctgcccgcgcggtgttccgcattctgcaagcctccggagcgcacgtcggcagtcggctccctcgttgaccgaatcaccgacctctctccccaggacccagctttcttgtacaaagtgggccaccatggtgagcaagggcgaggagctgttcaccggggtggtgcccatcctggtcgagctggacggcgacgtaaacggccacaagttcagcgtgtccggcgagggcgagggcgatgccacctacggcaagctgaccctgaagttcatctgcaccaccggcaagctgcccgtgccctggcccaccctcgtgaccaccctgacctacggcgtgcagtgcttcagccgctaccccgaccacatgaagcagcacgacttcttcaagtccgccatgcccgaaggctacgtccaggagcgcaccatcttcttcaaggacgacggcaactacaagacccgcgccgaggtgaagttcgagggcgacaccctggtgaaccgcatcgagctgaagggcatcgacttcaaggaggacggcaacatcctggggcacaagctggagtacaactacaacagccacaacgtctatatcatggccgacaagcagaagaacggcatcaaggtgaacttcaagatccgccacaacatcgaggacggcagcgtgcagctcgccgaccactaccagcagaacacccccatcggcgacggccccgtgctgctgcccgacaaccactacctgagcacccagtccgccctgagcaaagaccccaacgagaagcgcgatcacatggtcctgctggagttcgtgaccgccgccgggatcactctcggcatggacgagctgtacaagggaagcggagagggcaggggaagtcttctaacatgcggggacgtggaggaaaatcccggccccatgaccgagtacaagcccacggtgcgcctcgccacccgcgacgacgtccccagggccgtacgcaccctcgccgccgcgttcgccgactaccccgccacgcgccacaccgtcgatccggaccgccacatcgagcgggtcaccgagctgcaagaactcttcctcacgcgcgtcgggctcgacatcggcaaggtgtgggtcgcggacgacggcgccgcggtggcggtctggaccacgccggagagcgtcgaagcgggggcggtgttcgccgagatcggcccgcgcatggccgagttgagcggttcccggctggccgcgcagcaacagatggaaggcctcctggcgccgcaccggcccaaggagcccgcgtggttcctggccaccgtcggcgtctcgcccgaccaccagggcaagggtctgggcagcgccgtcgtgctccccggagtggaggcggccgagcgcgccggggtgcccgccttcctggagacctccgcgccccgcaacctccccttctacgagcggctcggcttcaccgtcaccgccgacgtcgaggtgcccgaaggaccgcgcacctggtgcatgacccgcaagcccggtgcctgacaactttattatacatagttgatggccggccgcttcgagcagacatgataagatacattgatgagtttggacaaaccacaactagaatgcagtgaaaaaaatgctttatttgtgaaatttgtgatgctattgctttatttgtaaccattataagctgcaataaacaagttaacaacaacaattgcattcattttatgtttcaggttcagggggaggtgtgggaggttttttaaagcaagtaaaacctctacaaatgtggtagcggccgcggcgctcttccgcttcctcgctcactgactcgctgcgctcggtcgttcggctgcggcgagcggtatcagctcactcaaaggcggtaatacggttatccacagaatcaggggataacgcaggaaagaacatgtgagcaaaaggccagcaaaaggccaggaaccgtaaaaaggccgcgttgctggcgtttttccataggctccgcccccctgacgagcatcacaaaaatcgacgctcaagtcagaggtggcgaaacccgacaggactataaagataccaggcgtttccccctggaagctccctcgtgcgctctcctgttccgaccctgccgcttaccggatacctgtccgcctttctctcttcgggaagcgtggcgctttctcatagctcacgctgtaggtatctcagttcggtgtaggtcgttcgctccaagctgggctgtgtgcacgaaccccccgttcagcccgaccgctgcgccttatccggtaactatcgtcttgagtccaacccggtaagacacgacttatcgccactggcagcagccactggtaacaggattagcagagcgaggtatgtaggcggtgctacagagttcttgaagtggtggcctaactacggctacactagaagaacagtatttggtatctgcgctctgctgaagccagttaccttcggaaaaagagttggtagctcttgatccggcaaacaaaccaccgctggtagcggtggtttttttgtttgcaagcagcagattacgcgcagaaaaaaaggatctcaagaagatcctttgatcttttctacggggtctgacgctcagtggaacgaaaactcacgttaagggattttggtcatgagattatcaaaaaggatcttcacctagatccttttaaattaaaaatgaagttttaaatcaatctaaagtatatatgagtaaacttggtctgacagttaccaatgcttaatcagtgaggcacctatctcagcgatctgtctatttcgttcatccatagttgcctgactccccgtcgtgtagataactacgatacgggagggcttaccatctggccccagtgctgcaatgataccgcgagacccacgctcaccggctccagatttatcagcaataaaccagccagccggaagggccgagcgcagaagtggtcctgcaactttatccgcctccatccagtctattaattgttgccgggaagctagagtaagtagttcgccagttaatagtttgcgcaacgttgttgccattgctacaggcatcgtggtgtcacgctcgtcgtttggtatggcttcattcagctccggttcccaacgatcaaggcgagttacatgatcccccatgttgtgcaaaaaagcggttagctccttcggtcctccgatcgttgtcagaagtaagttggccgcagtgttatcactcatggttatggcagcactgcataattctcttactgtcatgccatccgtaagatgcttttctgtgactggtgagtactcaaccaagtcattctgagaatagtgtatgcggcgaccgagttgctcttgcccggcgtcaatacgggataataccgcgccacatagcagaactttaaaagtgctcatcattggaaaacgttcttcggggcgaaaactctcaaggatcttaccgctgttgagatccagttcgatgtaacccactcgtgcacccaactgatcttcagcatcttttactttcaccagcgtttctgggtgagcaaaaacaggaaggcaaaatgccgcaaaaaagggaataagggcgacacggaaatgttgaatactcatactcttcctttttcaatattattgaagcatttatcagggttattgtctcatgagcggatacatatttgaatgtatttagaaaaataaacaaataggggttccgcgcacatttccccgaaaagtgccacctgacgtctaagaaaccattattatcatgacattaacctataaaaataggcgtatcacgaggccctttcgtcggcgcgccgcggccgc

SEQ ID NO: 666 - DNA, 4624 bp, synthetic construct
  source 1..4624: mol_type = other DNA
caactttgtatagaaaagttggagggcctatttcccatgattccttcatatttgcatatacgatacaaggctgttagagagataattggaattaatttgactgtaaacacaaagatattagtacaaaatacgtgacgtagaaagtaataatttcttgggtagtttgcagttttaaaattatgttttaaaatggactatcatatgcttaccgtaacttgaaagtatttcgatttcttggctttatatatcttgtggaaaggacgaaacaccgtgcacacctcctggcgggcagctctgctgctgctactgctgatgctgtgttctggcaatacctgcagcaacagcagaagcagcagcagggaggcctgccctgactgcccactttttgtttttcaagtttgtacaaaaaagcaggctgggttgcgccttttccaaggcagccctgggtttgcgcagggacgcggctgctctgggcgtggttccgggaaacgcagcggcgccgaccctgggtctcgcacattcttcacgtccgttcgcagcgtcacccggatcttcgccgctacccttgtgggccccccggcgacgcttcctgctccgcccctaagtcgggaaggttccttgcggttcgcggcgtgccggacgtgacaaacggaagccgcacgtctcactagtaccctcgcagacggacagcgccagggagcaatggcagcgcgccgaccgcgatgggctgtggccaatagcggctgctcagcagggcgcgccgagagcagcggccgggaaggggcggtgcgggaggcggggtgtggggcggtagtgtgggccctgttcctgcccgcgcggtgttccgcattctgcaagcctccggagcgcacgtcggcagtcggctccctcgttgaccgaatcaccgacctctctccccaggacccagctttcttgtacaaagtgggccaccatggtgagcaagggcgaggagctgttcaccggggtggtgcccatcctggtcgagctggacggcgacgtaaacggccacaagttcagcgtgtccggcgagggcgagggcgatgccacctacggcaagctgaccctgaagttcatctgcaccaccggcaagctgcccgtgccctggcccaccctcgtgaccaccctgacctacggcgtgcagtgcttcagccgctaccccgaccacatgaagcagcacgacttcttcaagtccgccatgcccgaaggctacgtccaggagcgcaccatcttcttcaaggacgacggcaactacaagacccgcgccgaggtgaagttcgagggcgacaccctggtgaaccgcatcgagctgaagggcatcgacttcaaggaggacggcaacatcctggggcacaagctggagtacaactacaacagccacaacgtctatatcatggccgacaagcagaagaacggcatcaaggtgaacttcaagatccgccacaacatcgaggacggcagcgtgcagctcgccgaccactaccagcagaacacccccatcggcgacggccccgtgctgctgcccgacaaccactacctgagcacccagtccgccctgagcaaagaccccaacgagaagcgcgatcacatggtcctgctggagttcgtgaccgccgccgggatcactctcggcatggacgagctgtacaagggaagcggagagggcaggggaagtcttctaacatgcggggacgtggaggaaaatcccggccccatgaccgagtacaagcccacggtgcgcctcgccacccgcgacgacgtccccagggccgtacgcaccctcgccgccgcgttcgccgactaccccgccacgcgccacaccgtcgatccggaccgccacatcgagcgggtcaccgagctgcaagaactcttcctcacgcgcgtcgggctcgacatcggcaaggtgtgggtcgcggacgacggcgccgcggtggcggtctggaccacgccggagagcgtcgaagcgggggcggtgttcgccgagatcggcccgcgcatggccgagttgagcggttcccggctggccgcgcagcaacagatggaaggcctcctggcgccgcaccggcccaaggagcccgcgtggttcctggccaccgtcggcgtctcgcccgaccaccagggcaagggtctgggcagcgccgtcgtgctccccggagtggaggcggccgagcgcgccggggtgcccgccttcctggagacctccgcgccccgcaacctccccttctacgagcggctcggcttcaccgtcaccgccgacgtcgaggtgcccgaaggaccgcgcacctggtgcatgacccgcaagcccggtgcctgacaactttattatacatagttgatggccggccgcttcgagcagacatgataagatacattgatgagtttggacaaaccacaactagaatgcagtgaaaaaaatgctttatttgtgaaatttgtgatgctattgctttatttgtaaccattataagctgcaataaacaagttaacaacaacaattgcattcattttatgtttcaggttcagggggaggtgtgggaggttttttaaagcaagtaaaacctctacaaatgtggtagcggccgcggcgctcttccgcttcctcgctcactgactcgctgcgctcggtcgttcggctgcggcgagcggtatcagctcactcaaaggcggtaatacggttatccacagaatcaggggataacgcaggaaagaacatgtgagcaaaaggccagcaaaaggccaggaaccgtaaaaaggccgcgttgctggcgtttttccataggctccgcccccctgacgagcatcacaaaaatcgacgctcaagtcagaggtggcgaaacccgacaggactataaagataccaggcgtttccccctggaagctccctcgtgcgctctcctgttccgaccctgccgcttaccggatacctgtccgcctttctctcttcgggaagcgtggcgctttctcatagctcacgctgtaggtatctcagttcggtgtaggtcgttcgctccaagctgggctgtgtgcacgaaccccccgttcagcccgaccgctgcgccttatccggtaactatcgtcttgagtccaacccggtaagacacgacttatcgccactggcagcagccactggtaacaggattagcagagcgaggtatgtaggcggtgctacagagttcttgaagtggtggcctaactacggctacactagaagaacagtatttggtatctgcgctctgctgaagccagttaccttcggaaaaagagttggtagctcttgatccggcaaacaaaccaccgctggtagcggtggtttttttgtttgcaagcagcagattacgcgcagaaaaaaaggatctcaagaagatcctttgatcttttctacggggtctgacgctcagtggaacgaaaactcacgttaagggattttggtcatgagattatcaaaaaggatcttcacctagatccttttaaattaaaaatgaagttttaaatcaatctaaagtatatatgagtaaacttggtctgacagttaccaatgcttaatcagtgaggcacctatctcagcgatctgtctatttcgttcatccatagttgcctgactccccgtcgtgtagataactacgatacgggagggcttaccatctggccccagtgctgcaatgataccgcgagacccacgctcaccggctccagatttatcagcaataaaccagccagccggaagggccgagcgcagaagtggtcctgcaactttatccgcctccatccagtctattaattgttgccgggaagctagagtaagtagttcgccagttaatagtttgcgcaacgttgttgccattgctacaggcatcgtggtgtcacgctcgtcgtttggtatggcttcattcagctccggttcccaacgatcaaggcgagttacatgatcccccatgttgtgcaaaaaagcggttagctccttcggtcctccgatcgttgtcagaagtaagttggccgcagtgttatcactcatggttatggcagcactgcataattctcttactgtcatgccatccgtaagatgcttttctgtgactggtgagtactcaaccaagtcattctgagaatagtgtatgcggcgaccgagttgctcttgcccggcgtcaatacgggataataccgcgccacatagcagaactttaaaagtgctcatcattggaaaacgttcttcggggcgaaaactctcaaggatcttaccgctgttgagatccagttcgatgtaacccactcgtgcacccaactgatcttcagcatcttttactttcaccagcgtttctgggtgagcaaaaacaggaaggcaaaatgccgcaaaaaagggaataagggcgacacggaaatgttgaatactcatactcttcctttttcaatattattgaagcatttatcagggttattgtctcatgagcggatacatatttgaatgtatttagaaaaataaacaaataggggttccgcgcacatttccccgaaaagtgccacctgacgtctaagaaaccattattatcatgacattaacctataaaaataggcgtatcacgaggccctttcgtcggcgcgccgcggccgc

SEQ ID NO: 667 - DNA, 4624 bp, synthetic construct
  source 1..4624: mol_type = other DNA
caactttgtatagaaaagttggagggcctatttcccatgattccttcatatttgcatatacgatacaaggctgttagagagataattggaattaatttgactgtaaacacaaagatattagtacaaaatacgtgacgtagaaagtaataatttcttgggtagtttgcagttttaaaattatgttttaaaatggactatcatatgcttaccgtaacttgaaagtatttcgatttcttggctttatatatcttgtggaaaggacgaaacaccgtgcacacctcctggcgggcagctctgctgctgctgaagctgctgctgtgttctggcaatacctgcagcagcagcaacagcagcagcagggaggcctgccctgactgcccactttttgtttttcaagtttgtacaaaaaagcaggctgggttgcgccttttccaaggcagccctgggtttgcgcagggacgcggctgctctgggcgtggttccgggaaacgcagcggcgccgaccctgggtctcgcacattcttcacgtccgttcgcagcgtcacccggatcttcgccgctacccttgtgggccccccggcgacgcttcctgctccgcccctaagtcgggaaggttccttgcggttcgcggcgtgccggacgtgacaaacggaagccgcacgtctcactagtaccctcgcagacggacagcgccagggagcaatggcagcgcgccgaccgcgatgggctgtggccaatagcggctgctcagcagggcgcgccgagagcagcggccgggaaggggcggtgcgggaggcggggtgtggggcggtagtgtgggccctgttcctgcccgcgcggtgttccgcattctgcaagcctccggagcgcacgtcggcagtcggctccctcgttgaccgaatcaccgacctctctccccaggacccagctttcttgtacaaagtgggccaccatggtgagcaagggcgaggagctgttcaccggggtggtgcccatcctggtcgagctggacggcgacgtaaacggccacaagttcagcgtgtccggcgagggcgagggcgatgccacctacggcaagctgaccctgaagttcatctgcaccaccggcaagctgcccgtgccctggcccaccctcgtgaccaccctgacctacggcgtgcagtgcttcagccgctaccccgaccacatgaagcagcacgacttcttcaagtccgccatgcccgaaggctacgtccaggagcgcaccatcttcttcaaggacgacggcaactacaagacccgcgccgaggtgaagttcgagggcgacaccctggtgaaccgcatcgagctgaagggcatcgacttcaaggaggacggcaacatcctggggcacaagctggagtacaactacaacagccacaacgtctatatcatggccgacaagcagaagaacggcatcaaggtgaacttcaagatccgccacaacatcgaggacggcagcgtgcagctcgccgaccactaccagcagaacacccccatcggcgacggccccgtgctgctgcccgacaaccactacctgagcacccagtccgccctgagcaaagaccccaacgagaagcgcgatcacatggtcctgctggagttcgtgaccgccgccgggatcactctcggcatggacgagctgtacaagggaagcggagagggcaggggaagtcttctaacatgcggggacgtggaggaaaatcccggccccatgaccgagtacaagcccacggtgcgcctcgccacccgcgacgacgtccccagggccgtacgcaccctcgccgccgcgttcgccgactaccccgccacgcgccacaccgtcgatccggaccgccacatcgagcgggtcaccgagctgcaagaactcttcctcacgcgcgtcgggctcgacatcggcaaggtgtgggtcgcggacgacggcgccgcggtggcggtctggaccacgccggagagcgtcgaagcgggggcggtgttcgccgagatcggcccgcgcatggccgagttgagcggttcccggctggccgcgcagcaacagatggaaggcctcctggcgccgcaccggcccaaggagcccgcgtggttcctggccaccgtcggcgtctcgcccgaccaccagggcaagggtctgggcagcgccgtcgtgctccccggagtggaggcggccgagcgcgccggggtgcccgccttcctggagacctccgcgccccgcaacctccccttctacgagcggctcggcttcaccgtcaccgccgacgtcgaggtgcccgaaggaccgcgcacctggtgcatgacccgcaagcccggtgcctgacaactttattatacatagttgatggccggccgcttcgagcagacatgataagatacattgatgagtttggacaaaccacaactagaatgcagtgaaaaaaatgctttatttgtgaaatttgtgatgctattgctttatttgtaaccattataagctgcaataaacaagttaacaacaacaattgcattcattttatgtttcaggttcagggggaggtgtgggaggttttttaaagcaagtaaaacctctacaaatgtggtagcggccgcggcgctcttccgcttcctcgctcactgactcgctgcgctcggtcgttcggctgcggcgagcggtatcagctcactcaaaggcggtaatacggttatccacagaatcaggggataacgcaggaaagaacatgtgagcaaaaggccagcaaaaggccaggaaccgtaaaaaggccgcgttgctggcgtttttccataggctccgcccccctgacgagcatcacaaaaatcgacgctcaagtcagaggtggcgaaacccgacaggactataaagataccaggcgtttccccctggaagctccctcgtgcgctctcctgttccgaccctgccgcttaccggatacctgtccgcctttctctcttcgggaagcgtggcgctttctcatagctcacgctgtaggtatctcagttcggtgtaggtcgttcgctccaagctgggctgtgtgcacgaaccccccgttcagcccgaccgctgcgccttatccggtaactatcgtcttgagtccaacccggtaagacacgacttatcgccactggcagcagccactggtaacaggattagcagagcgaggtatgtaggcggtgctacagagttcttgaagtggtggcctaactacggctacactagaagaacagtatttggtatctgcgctctgctgaagccagttaccttcggaaaaagagttggtagctcttgatccggcaaacaaaccaccgctggtagcggtggtttttttgtttgcaagcagcagattacgcgcagaaaaaaaggatctcaagaagatcctttgatcttttctacggggtctgacgctcagtggaacgaaaactcacgttaagggattttggtcatgagattatcaaaaaggatcttcacctagatccttttaaattaaaaatgaagttttaaatcaatctaaagtatatatgagtaaacttggtctgacagttaccaatgcttaatcagtgaggcacctatctcagcgatctgtctatttcgttcatccatagttgcctgactccccgtcgtgtagataactacgatacgggagggcttaccatctggccccagtgctgcaatgataccgcgagacccacgctcaccggctccagatttatcagcaataaaccagccagccggaagggccgagcgcagaagtggtcctgcaactttatccgcctccatccagtctattaattgttgccgggaagctagagtaagtagttcgccagttaatagtttgcgcaacgttgttgccattgctacaggcatcgtggtgtcacgctcgtcgtttggtatggcttcattcagctccggttcccaacgatcaaggcgagttacatgatcccccatgttgtgcaaaaaagcggttagctccttcggtcctccgatcgttgtcagaagtaagttggccgcagtgttatcactcatggttatggcagcactgcataattctcttactgtcatgccatccgtaagatgcttttctgtgactggtgagtactcaaccaagtcattctgagaatagtgtatgcggcgaccgagttgctcttgcccggcgtcaatacgggataataccgcgccacatagcagaactttaaaagtgctcatcattggaaaacgttcttcggggcgaaaactctcaaggatcttaccgctgttgagatccagttcgatgtaacccactcgtgcacccaactgatcttcagcatcttttactttcaccagcgtttctgggtgagcaaaaacaggaaggcaaaatgccgcaaaaaagggaataagggcgacacggaaatgttgaatactcatactcttcctttttcaatattattgaagcatttatcagggttattgtctcatgagcggatacatatttgaatgtatttagaaaaataaacaaataggggttccgcgcacatttccccgaaaagtgccacctgacgtctaagaaaccattattatcatgacattaacctataaaaataggcgtatcacgaggccctttcgtcggcgcgccgcggccgc

SEQ ID NO: 668 - DNA, 4624 bp, synthetic construct
  source 1..4624: mol_type = other DNA
caactttgtatagaaaagttggagggcctatttcccatgattccttcatatttgcatatacgatacaaggctgttagagagataattggaattaatttgactgtaaacacaaagatattagtacaaaatacgtgacgtagaaagtaataatttcttgggtagtttgcagttttaaaattatgttttaaaatggactatcatatgcttaccgtaacttgaaagtatttcgatttcttggctttatatatcttgtggaaaggacgaaacaccgtgcacacctcctggcgggcagctctgctgctgctgatactgctgctgtgttctggcaatacctgcagcagcagaaacagcagcagcagggaggcctgccctgactgcccactttttgtttttcaagtttgtacaaaaaagcaggctgggttgcgccttttccaaggcagccctgggtttgcgcagggacgcggctgctctgggcgtggttccgggaaacgcagcggcgccgaccctgggtctcgcacattcttcacgtccgttcgcagcgtcacccggatcttcgccgctacccttgtgggccccccggcgacgcttcctgctccgcccctaagtcgggaaggttccttgcggttcgcggcgtgccggacgtgacaaacggaagccgcacgtctcactagtaccctcgcagacggacagcgccagggagcaatggcagcgcgccgaccgcgatgggctgtggccaatagcggctgctcagcagggcgcgccgagagcagcggccgggaaggggcggtgcgggaggcggggtgtggggcggtagtgtgggccctgttcctgcccgcgcggtgttccgcattctgcaagcctccggagcgcacgtcggcagtcggctccctcgttgaccgaatcaccgacctctctccccaggacccagctttcttgtacaaagtgggccaccatggtgagcaagggcgaggagctgttcaccggggtggtgcccatcctggtcgagctggacggcgacgtaaacggccacaagttcagcgtgtccggcgagggcgagggcgatgccacctacggcaagctgaccctgaagttcatctgcaccaccggcaagctgcccgtgccctggcccaccctcgtgaccaccctgacctacggcgtgcagtgcttcagccgctaccccgaccacatgaagcagcacgacttcttcaagtccgccatgcccgaaggctacgtccaggagcgcaccatcttcttcaaggacgacggcaactacaagacccgcgccgaggtgaagttcgagggcgacaccctggtgaaccgcatcgagctgaagggcatcgacttcaaggaggacggcaacatcctggggcacaagctggagtacaactacaacagccacaacgtctatatcatggccgacaagcagaagaacggcatcaaggtgaacttcaagatccgccacaacatcgaggacggcagcgtgcagctcgccgaccactaccagcagaacacccccatcggcgacggccccgtgctgctgcccgacaaccactacctgagcacccagtccgccctgagcaaagaccccaacgagaagcgcgatcacatggtcctgctggagttcgtgaccgccgccgggatcactctcggcatggacgagctgtacaagggaagcggagagggcaggggaagtcttctaacatgcggggacgtggaggaaaatcccggccccatgaccgagtacaagcccacggtgcgcctcgccacccgcgacgacgtccccagggccgtacgcaccctcgccgccgcgttcgccgactaccccgccacgcgccacaccgtcgatccggaccgccacatcgagcgggtcaccgagctgcaagaactcttcctcacgcgcgtcgggctcgacatcggcaaggtgtgggtcgcggacgacggcgccgcggtggcggtctggaccacgccggagagcgtcgaagcgggggcggtgttcgccgagatcggcccgcgcatggccgagttgagcggttcccggctggccgcgcagcaacagatggaaggcctcctggcgccgcaccggcccaaggagcccgcgtggttcctggccaccgtcggcgtctcgcccgaccaccagggcaagggtctgggcagcgccgtcgtgctccccggagtggaggcggccgagcgcgccggggtgcccgccttcctggagacctccgcgccccgcaacctccccttctacgagcggctcggcttcaccgtcaccgccgacgtcgaggtgcccgaaggaccgcgcacctggtgcatgacccgcaagcccggtgcctgacaactttattatacatagttgatggccggccgcttcgagcagacatgataagatacattgatgagtttggacaaaccacaactagaatgcagtgaaaaaaatgctttatttgtgaaatttgtgatgctattgctttatttgtaaccattataagctgcaataaacaagttaacaacaacaattgcattcattttatgtttcaggttcagggggaggtgtgggaggttttttaaagcaagtaaaacctctacaaatgtggtagcggccgcggcgctcttccgcttcctcgctcactgactcgctgcgctcggtcgttcggctgcggcgagcggtatcagctcactcaaaggcggtaatacggttatccacagaatcaggggataacgcaggaaagaacatgtgagcaaaaggccagcaaaaggccaggaaccgtaaaaaggccgcgttgctggcgtttttccataggctccgcccccctgacgagcatcacaaaaatcgacgctcaagtcagaggtggcgaaacccgacaggactataaagataccaggcgtttccccctggaagctccctcgtgcgctctcctgttccgaccctgccgcttaccggatacctgtccgcctttctctcttcgggaagcgtggcgctttctcatagctcacgctgtaggtatctcagttcggtgtaggtcgttcgctccaagctgggctgtgtgcacgaaccccccgttcagcccgaccgctgcgccttatccggtaactatcgtcttgagtccaacccggtaagacacgacttatcgccactggcagcagccactggtaacaggattagcagagcgaggtatgtaggcggtgctacagagttcttgaagtggtggcctaactacggctacactagaagaacagtatttggtatctgcgctctgctgaagccagttaccttcggaaaaagagttggtagctcttgatccggcaaacaaaccaccgctggtagcggtggtttttttgtttgcaagcagcagattacgcgcagaaaaaaaggatctcaagaagatcctttgatcttttctacggggtctgacgctcagtggaacgaaaactcacgttaagggattttggtcatgagattatcaaaaaggatcttcacctagatccttttaaattaaaaatgaagttttaaatcaatctaaagtatatatgagtaaacttggtctgacagttaccaatgcttaatcagtgaggcacctatctcagcgatctgtctatttcgttcatccatagttgcctgactccccgtcgtgtagataactacgatacgggagggcttaccatctggccccagtgctgcaatgataccgcgagacccacgctcaccggctccagatttatcagcaataaaccagccagccggaagggccgagcgcagaagtggtcctgcaactttatccgcctccatccagtctattaattgttgccgggaagctagagtaagtagttcgccagttaatagtttgcgcaacgttgttgccattgctacaggcatcgtggtgtcacgctcgtcgtttggtatggcttcattcagctccggttcccaacgatcaaggcgagttacatgatcccccatgttgtgcaaaaaagcggttagctccttcggtcctccgatcgttgtcagaagtaagttggccgcagtgttatcactcatggttatggcagcactgcataattctcttactgtcatgccatccgtaagatgcttttctgtgactggtgagtactcaaccaagtcattctgagaatagtgtatgcggcgaccgagttgctcttgcccggcgtcaatacgggataataccgcgccacatagcagaactttaaaagtgctcatcattggaaaacgttcttcggggcgaaaactctcaaggatcttaccgctgttgagatccagttcgatgtaacccactcgtgcacccaactgatcttcagcatcttttactttcaccagcgtttctgggtgagcaaaaacaggaaggcaaaatgccgcaaaaaagggaataagggcgacacggaaatgttgaatactcatactcttcctttttcaatattattgaagcatttatcagggttattgtctcatgagcggatacatatttgaatgtatttagaaaaataaacaaataggggttccgcgcacatttccccgaaaagtgccacctgacgtctaagaaaccattattatcatgacattaacctataaaaataggcgtatcacgaggccctttcgtcggcgcgccgcggccgc

SEQ ID NO: 669 - DNA, 4624 bp, synthetic construct
  source 1..4624: mol_type = other DNA
caactttgtatagaaaagttggagggcctatttcccatgattccttcatatttgcatatacgatacaaggctgttagagagataattggaattaatttgactgtaaacacaaagatattagtacaaaatacgtgacgtagaaagtaataatttcttgggtagtttgcagttttaaaattatgttttaaaatggactatcatatgcttaccgtaacttgaaagtatttcgatttcttggctttatatatcttgtggaaaggacgaaacaccgtgcacacctcctggcgggcagctctgctgctgctgatgatgctgctgtgttctggcaatacctgcagcagcaacaacagcagcagcagggaggcctgccctgactgcccactttttgtttttcaagtttgtacaaaaaagcaggctgggttgcgccttttccaaggcagccctgggtttgcgcagggacgcggctgctctgggcgtggttccgggaaacgcagcggcgccgaccctgggtctcgcacattcttcacgtccgttcgcagcgtcacccggatcttcgccgctacccttgtgggccccccggcgacgcttcctgctccgcccctaagtcgggaaggttccttgcggttcgcggcgtgccggacgtgacaaacggaagccgcacgtctcactagtaccctcgcagacggacagcgccagggagcaatggcagcgcgccgaccgcgatgggctgtggccaatagcggctgctcagcagggcgcgccgagagcagcggccgggaaggggcggtgcgggaggcggggtgtggggcggtagtgtgggccctgttcctgcccgcgcggtgttccgcattctgcaagcctccggagcgcacgtcggcagtcggctccctcgttgaccgaatcaccgacctctctccccaggacccagctttcttgtacaaagtgggccaccatggtgagcaagggcgaggagctgttcaccggggtggtgcccatcctggtcgagctggacggcgacgtaaacggccacaagttcagcgtgtccggcgagggcgagggcgatgccacctacggcaagctgaccctgaagttcatctgcaccaccggcaagctgcccgtgccctggcccaccctcgtgaccaccctgacctacggcgtgcagtgcttcagccgctaccccgaccacatgaagcagcacgacttcttcaagtccgccatgcccgaaggctacgtccaggagcgcaccatcttcttcaaggacgacggcaactacaagacccgcgccgaggtgaagttcgagggcgacaccctggtgaaccgcatcgagctgaagggcatcgacttcaaggaggacggcaacatcctggggcacaagctggagtacaactacaacagccacaacgtctatatcatggccgacaagcagaagaacggcatcaaggtgaacttcaagatccgccacaacatcgaggacggcagcgtgcagctcgccgaccactaccagcagaacacccccatcggcgacggccccgtgctgctgcccgacaaccactacctgagcacccagtccgccctgagcaaagaccccaacgagaagcgcgatcacatggtcctgctggagttcgtgaccgccgccgggatcactctcggcatggacgagctgtacaagggaagcggagagggcaggggaagtcttctaacatgcggggacgtggaggaaaatcccggccccatgaccgagtacaagcccacggtgcgcctcgccacccgcgacgacgtccccagggccgtacgcaccctcgccgccgcgttcgccgactaccccgccacgcgccacaccgtcgatccggaccgccacatcgagcgggtcaccgagctgcaagaactcttcctcacgcgcgtcgggctcgacatcggcaaggtgtgggtcgcggacgacggcgccgcggtggcggtctggaccacgccggagagcgtcgaagcgggggcggtgttcgccgagatcggcccgcgcatggccgagttgagcggttcccggctggccgcgcagcaacagatggaaggcctcctggcgccgcaccggcccaaggagcccgcgtggttcctggccaccgtcggcgtctcgcccgaccaccagggcaagggtctgggcagcgccgtcgtgctccccggagtggaggcggccgagcgcgccggggtgcccgccttcctggagacctccgcgccccgcaacctccccttctacgagcggctcggcttcaccgtcaccgccgacgtcgaggtgcccgaaggaccgcgcacctggtgcatgacccgcaagcccggtgcctgacaactttattatacatagttgatggccggccgcttcgagcagacatgataagatacattgatgagtttggacaaaccacaactagaatgcagtgaaaaaaatgctttatttgtgaaatttgtgatgctattgctttatttgtaaccattataagctgcaataaacaagttaacaacaacaattgcattcattttatgtttcaggttcagggggaggtgtgggaggttttttaaagcaagtaaaacctctacaaatgtggtagcggccgcggcgctcttccgcttcctcgctcactgactcgctgcgctcggtcgttcggctgcggcgagcggtatcagctcactcaaaggcggtaatacggttatccacagaatcaggggataacgcaggaaagaacatgtgagcaaaaggccagcaaaaggccaggaaccgtaaaaaggccgcgttgctggcgtttttccataggctccgcccccctgacgagcatcacaaaaatcgacgctcaagtcagaggtggcgaaacccgacaggactataaagataccaggcgtttccccctggaagctccctcgtgcgctctcctgttccgaccctgccgcttaccggatacctgtccgcctttctctcttcgggaagcgtggcgctttctcatagctcacgctgtaggtatctcagttcggtgtaggtcgttcgctccaagctgggctgtgtgcacgaaccccccgttcagcccgaccgctgcgccttatccggtaactatcgtcttgagtccaacccggtaagacacgacttatcgccactggcagcagccactggtaacaggattagcagagcgaggtatgtaggcggtgctacagagttcttgaagtggtggcctaactacggctacactagaagaacagtatttggtatctgcgctctgctgaagccagttaccttcggaaaaagagttggtagctcttgatccggcaaacaaaccaccgctggtagcggtggtttttttgtttgcaagcagcagattacgcgcagaaaaaaaggatctcaagaagatcctttgatcttttctacggggtctgacgctcagtggaacgaaaactcacgttaagggattttggtcatgagattatcaaaaaggatcttcacctagatccttttaaattaaaaatgaagttttaaatcaatctaaagtatatatgagtaaacttggtctgacagttaccaatgcttaatcagtgaggcacctatctcagcgatctgtctatttcgttcatccatagttgcctgactccccgtcgtgtagataactacgatacgggagggcttaccatctggccccagtgctgcaatgataccgcgagacccacgctcaccggctccagatttatcagcaataaaccagccagccggaagggccgagcgcagaagtggtcctgcaactttatccgcctccatccagtctattaattgttgccgggaagctagagtaagtagttcgccagttaatagtttgcgcaacgttgttgccattgctacaggcatcgtggtgtcacgctcgtcgtttggtatggcttcattcagctccggttcccaacgatcaaggcgagttacatgatcccccatgttgtgcaaaaaagcggttagctccttcggtcctccgatcgttgtcagaagtaagttggccgcagtgttatcactcatggttatggcagcactgcataattctcttactgtcatgccatccgtaagatgcttttctgtgactggtgagtactcaaccaagtcattctgagaatagtgtatgcggcgaccgagttgctcttgcccggcgtcaatacgggataataccgcgccacatagcagaactttaaaagtgctcatcattggaaaacgttcttcggggcgaaaactctcaaggatcttaccgctgttgagatccagttcgatgtaacccactcgtgcacccaactgatcttcagcatcttttactttcaccagcgtttctgggtgagcaaaaacaggaaggcaaaatgccgcaaaaaagggaataagggcgacacggaaatgttgaatactcatactcttcctttttcaatattattgaagcatttatcagggttattgtctcatgagcggatacatatttgaatgtatttagaaaaataaacaaataggggttccgcgcacatttccccgaaaagtgccacctgacgtctaagaaaccattattatcatgacattaacctataaaaataggcgtatcacgaggccctttcgtcggcgcgccgcggccgc

SEQ ID NO: 670 - DNA, 4624 bp, synthetic construct
  source 1..4624: mol_type = other DNA
caactttgtatagaaaagttggagggcctatttcccatgattccttcatatttgcatatacgatacaaggctgttagagagataattggaattaatttgactgtaaacacaaagatattagtacaaaatacgtgacgtagaaagtaataatttcttgggtagtttgcagttttaaaattatgttttaaaatggactatcatatgcttaccgtaacttgaaagtatttcgatttcttggctttatatatcttgtggaaaggacgaaacaccgtgcacacctcctggcgggcagctctgctgctgctgatgcagctgctgtgttctggcaatacctgcagcagcagcaacagcagcagcagggaggcctgccctgactgcccactttttgtttttcaagtttgtacaaaaaagcaggctgggttgcgccttttccaaggcagccctgggtttgcgcagggacgcggctgctctgggcgtggttccgggaaacgcagcggcgccgaccctgggtctcgcacattcttcacgtccgttcgcagcgtcacccggatcttcgccgctacccttgtgggccccccggcgacgcttcctgctccgcccctaagtcgggaaggttccttgcggttcgcggcgtgccggacgtgacaaacggaagccgcacgtctcactagtaccctcgcagacggacagcgccagggagcaatggcagcgcgccgaccgcgatgggctgtggccaatagcggctgctcagcagggcgcgccgagagcagcggccgggaaggggcggtgcgggaggcggggtgtggggcggtagtgtgggccctgttcctgcccgcgcggtgttccgcattctgcaagcctccggagcgcacgtcggcagtcggctccctcgttgaccgaatcaccgacctctctccccaggacccagctttcttgtacaaagtgggccaccatggtgagcaagggcgaggagctgttcaccggggtggtgcccatcctggtcgagctggacggcgacgtaaacggccacaagttcagcgtgtccggcgagggcgagggcgatgccacctacggcaagctgaccctgaagttcatctgcaccaccggcaagctgcccgtgccctggcccaccctcgtgaccaccctgacctacggcgtgcagtgcttcagccgctaccccgaccacatgaagcagcacgacttcttcaagtccgccatgcccgaaggctacgtccaggagcgcaccatcttcttcaaggacgacggcaactacaagacccgcgccgaggtgaagttcgagggcgacaccctggtgaaccgcatcgagctgaagggcatcgacttcaaggaggacggcaacatcctggggcacaagctggagtacaactacaacagccacaacgtctatatcatggccgacaagcagaagaacggcatcaaggtgaacttcaagatccgccacaacatcgaggacggcagcgtgcagctcgccgaccactaccagcagaacacccccatcggcgacggccccgtgctgctgcccgacaaccactacctgagcacccagtccgccctgagcaaagaccccaacgagaagcgcgatcacatggtcctgctggagttcgtgaccgccgccgggatcactctcggcatggacgagctgtacaagggaagcggagagggcaggggaagtcttctaacatgcggggacgtggaggaaaatcccggccccatgaccgagtacaagcccacggtgcgcctcgccacccgcgacgacgtccccagggccgtacgcaccctcgccgccgcgttcgccgactaccccgccacgcgccacaccgtcgatccggaccgccacatcgagcgggtcaccgagctgcaagaactcttcctcacgcgcgtcgggctcgacatcggcaaggtgtgggtcgcggacgacggcgccgcggtggcggtctggaccacgccggagagcgtcgaagcgggggcggtgttcgccgagatcggcccgcgcatggccgagttgagcggttcccggctggccgcgcagcaacagatggaaggcctcctggcgccgcaccggcccaaggagcccgcgtggttcctggccaccgtcggcgtctcgcccgaccaccagggcaagggtctgggcagcgccgtcgtgctccccggagtggaggcggccgagcgcgccggggtgcccgccttcctggagacctccgcgccccgcaacctccccttctacgagcggctcggcttcaccgtcaccgccgacgtcgaggtgcccgaaggaccgcgcacctggtgcatgacccgcaagcccggtgcctgacaactttattatacatagttgatggccggccgcttcgagcagacatgataagatacattgatgagtttggacaaaccacaactagaatgcagtgaaaaaaatgctttatttgtgaaatttgtgatgctattgctttatttgtaaccattataagctgcaataaacaagttaacaacaacaattgcattcattttatgtttcaggttcagggggaggtgtgggaggttttttaaagcaagtaaaacctctacaaatgtggtagcggccgcggcgctcttccgcttcctcgctcactgactcgctgcgctcggtcgttcggctgcggcgagcggtatcagctcactcaaaggcggtaatacggttatccacagaatcaggggataacgcaggaaagaacatgtgagcaaaaggccagcaaaaggccaggaaccgtaaaaaggccgcgttgctggcgtttttccataggctccgcccccctgacgagcatcacaaaaatcgacgctcaagtcagaggtggcgaaacccgacaggactataaagataccaggcgtttccccctggaagctccctcgtgcgctctcctgttccgaccctgccgcttaccggatacctgtccgcctttctctcttcgggaagcgtggcgctttctcatagctcacgctgtaggtatctcagttcggtgtaggtcgttcgctccaagctgggctgtgtgcacgaaccccccgttcagcccgaccgctgcgccttatccggtaactatcgtcttgagtccaacccggtaagacacgacttatcgccactggcagcagccactggtaacaggattagcagagcgaggtatgtaggcggtgctacagagttcttgaagtggtggcctaactacggctacactagaagaacagtatttggtatctgcgctctgctgaagccagttaccttcggaaaaagagttggtagctcttgatccggcaaacaaaccaccgctggtagcggtggtttttttgtttgcaagcagcagattacgcgcagaaaaaaaggatctcaagaagatcctttgatcttttctacggggtctgacgctcagtggaacgaaaactcacgttaagggattttggtcatgagattatcaaaaaggatcttcacctagatccttttaaattaaaaatgaagttttaaatcaatctaaagtatatatgagtaaacttggtctgacagttaccaatgcttaatcagtgaggcacctatctcagcgatctgtctatttcgttcatccatagttgcctgactccccgtcgtgtagataactacgatacgggagggcttaccatctggccccagtgctgcaatgataccgcgagacccacgctcaccggctccagatttatcagcaataaaccagccagccggaagggccgagcgcagaagtggtcctgcaactttatccgcctccatccagtctattaattgttgccgggaagctagagtaagtagttcgccagttaatagtttgcgcaacgttgttgccattgctacaggcatcgtggtgtcacgctcgtcgtttggtatggcttcattcagctccggttcccaacgatcaaggcgagttacatgatcccccatgttgtgcaaaaaagcggttagctccttcggtcctccgatcgttgtcagaagtaagttggccgcagtgttatcactcatggttatggcagcactgcataattctcttactgtcatgccatccgtaagatgcttttctgtgactggtgagtactcaaccaagtcattctgagaatagtgtatgcggcgaccgagttgctcttgcccggcgtcaatacgggataataccgcgccacatagcagaactttaaaagtgctcatcattggaaaacgttcttcggggcgaaaactctcaaggatcttaccgctgttgagatccagttcgatgtaacccactcgtgcacccaactgatcttcagcatcttttactttcaccagcgtttctgggtgagcaaaaacaggaaggcaaaatgccgcaaaaaagggaataagggcgacacggaaatgttgaatactcatactcttcctttttcaatattattgaagcatttatcagggttattgtctcatgagcggatacatatttgaatgtatttagaaaaataaacaaataggggttccgcgcacatttccccgaaaagtgccacctgacgtctaagaaaccattattatcatgacattaacctataaaaataggcgtatcacgaggccctttcgtcggcgcgccgcggccgc

SEQ ID NO: 671 - DNA, 4624 bp, synthetic construct
  source 1..4624: mol_type = other DNA
caactttgtatagaaaagttggagggcctatttcccatgattccttcatatttgcatatacgatacaaggctgttagagagataattggaattaatttgactgtaaacacaaagatattagtacaaaatacgtgacgtagaaagtaataatttcttgggtagtttgcagttttaaaattatgttttaaaatggactatcatatgcttaccgtaacttgaaagtatttcgatttcttggctttatatatcttgtggaaaggacgaaacaccgtgcacacctcctggcgggcagctctgctgctgctgatgctactgctgtgttctggcaatacctgcagcagaagcaacagcagcagcagggaggcctgccctgactgcccactttttgtttttcaagtttgtacaaaaaagcaggctgggttgcgccttttccaaggcagccctgggtttgcgcagggacgcggctgctctgggcgtggttccgggaaacgcagcggcgccgaccctgggtctcgcacattcttcacgtccgttcgcagcgtcacccggatcttcgccgctacccttgtgggccccccggcgacgcttcctgctccgcccctaagtcgggaaggttccttgcggttcgcggcgtgccggacgtgacaaacggaagccgcacgtctcactagtaccctcgcagacggacagcgccagggagcaatggcagcgcgccgaccgcgatgggctgtggccaatagcggctgctcagcagggcgcgccgagagcagcggccgggaaggggcggtgcgggaggcggggtgtggggcggtagtgtgggccctgttcctgcccgcgcggtgttccgcattctgcaagcctccggagcgcacgtcggcagtcggctccctcgttgaccgaatcaccgacctctctccccaggacccagctttcttgtacaaagtgggccaccatggtgagcaagggcgaggagctgttcaccggggtggtgcccatcctggtcgagctggacggcgacgtaaacggccacaagttcagcgtgtccggcgagggcgagggcgatgccacctacggcaagctgaccctgaagttcatctgcaccaccggcaagctgcccgtgccctggcccaccctcgtgaccaccctgacctacggcgtgcagtgcttcagccgctaccccgaccacatgaagcagcacgacttcttcaagtccgccatgcccgaaggctacgtccaggagcgcaccatcttcttcaaggacgacggcaactacaagacccgcgccgaggtgaagttcgagggcgacaccctggtgaaccgcatcgagctgaagggcatcgacttcaaggaggacggcaacatcctggggcacaagctggagtacaactacaacagccacaacgtctatatcatggccgacaagcagaagaacggcatcaaggtgaacttcaagatccgccacaacatcgaggacggcagcgtgcagctcgccgaccactaccagcagaacacccccatcggcgacggccccgtgctgctgcccgacaaccactacctgagcacccagtccgccctgagcaaagaccccaacgagaagcgcgatcacatggtcctgctggagttcgtgaccgccgccgggatcactctcggcatggacgagctgtacaagggaagcggagagggcaggggaagtcttctaacatgcggggacgtggaggaaaatcccggccccatgaccgagtacaagcccacggtgcgcctcgccacccgcgacgacgtccccagggccgtacgcaccctcgccgccgcgttcgccgactaccccgccacgcgccacaccgtcgatccggaccgccacatcgagcgggtcaccgagctgcaagaactcttcctcacgcgcgtcgggctcgacatcggcaaggtgtgggtcgcggacgacggcgccgcggtggcggtctggaccacgccggagagcgtcgaagcgggggcggtgttcgccgagatcggcccgcgcatggccgagttgagcggttcccggctggccgcgcagcaacagatggaaggcctcctggcgccgcaccggcccaaggagcccgcgtggttcctggccaccgtcggcgtctcgcccgaccaccagggcaagggtctgggcagcgccgtcgtgctccccggagtggaggcggccgagcgcgccggggtgcccgccttcctggagacctccgcgccccgcaacctccccttctacgagcggctcggcttcaccgtcaccgccgacgtcgaggtgcccgaaggaccgcgcacctggtgcatgacccgcaagcccggtgcctgacaactttattatacatagttgatggccggccgcttcgagcagacatgataagatacattgatgagtttggacaaaccacaactagaatgcagtgaaaaaaatgctttatttgtgaaatttgtgatgctattgctttatttgtaaccattataagctgcaataaacaagttaacaacaacaattgcattcattttatgtttcaggttcagggggaggtgtgggaggttttttaaagcaagtaaaacctctacaaatgtggtagcggccgcggcgctcttccgcttcctcgctcactgactcgctgcgctcggtcgttcggctgcggcgagcggtatcagctcactcaaaggcggtaatacggttatccacagaatcaggggataacgcaggaaagaacatgtgagcaaaaggccagcaaaaggccaggaaccgtaaaaaggccgcgttgctggcgtttttccataggctccgcccccctgacgagcatcacaaaaatcgacgctcaagtcagaggtggcgaaacccgacaggactataaagataccaggcgtttccccctggaagctccctcgtgcgctctcctgttccgaccctgccgcttaccggatacctgtccgcctttctctcttcgggaagcgtggcgctttctcatagctcacgctgtaggtatctcagttcggtgtaggtcgttcgctccaagctgggctgtgtgcacgaaccccccgttcagcccgaccgctgcgccttatccggtaactatcgtcttgagtccaacccggtaagacacgacttatcgccactggcagcagccactggtaacaggattagcagagcgaggtatgtaggcggtgctacagagttcttgaagtggtggcctaactacggctacactagaagaacagtatttggtatctgcgctctgctgaagccagttaccttcggaaaaagagttggtagctcttgatccggcaaacaaaccaccgctggtagcggtggtttttttgtttgcaagcagcagattacgcgcagaaaaaaaggatctcaagaagatcctttgatcttttctacggggtctgacgctcagtggaacgaaaactcacgttaagggattttggtcatgagattatcaaaaaggatcttcacctagatccttttaaattaaaaatgaagttttaaatcaatctaaagtatatatgagtaaacttggtctgacagttaccaatgcttaatcagtgaggcacctatctcagcgatctgtctatttcgttcatccatagttgcctgactccccgtcgtgtagataactacgatacgggagggcttaccatctggccccagtgctgcaatgataccgcgagacccacgctcaccggctccagatttatcagcaataaaccagccagccggaagggccgagcgcagaagtggtcctgcaactttatccgcctccatccagtctattaattgttgccgggaagctagagtaagtagttcgccagttaatagtttgcgcaacgttgttgccattgctacaggcatcgtggtgtcacgctcgtcgtttggtatggcttcattcagctccggttcccaacgatcaaggcgagttacatgatcccccatgttgtgcaaaaaagcggttagctccttcggtcctccgatcgttgtcagaagtaagttggccgcagtgttatcactcatggttatggcagcactgcataattctcttactgtcatgccatccgtaagatgcttttctgtgactggtgagtactcaaccaagtcattctgagaatagtgtatgcggcgaccgagttgctcttgcccggcgtcaatacgggataataccgcgccacatagcagaactttaaaagtgctcatcattggaaaacgttcttcggggcgaaaactctcaaggatcttaccgctgttgagatccagttcgatgtaacccactcgtgcacccaactgatcttcagcatcttttactttcaccagcgtttctgggtgagcaaaaacaggaaggcaaaatgccgcaaaaaagggaataagggcgacacggaaatgttgaatactcatactcttcctttttcaatattattgaagcatttatcagggttattgtctcatgagcggatacatatttgaatgtatttagaaaaataaacaaataggggttccgcgcacatttccccgaaaagtgccacctgacgtctaagaaaccattattatcatgacattaacctataaaaataggcgtatcacgaggccctttcgtcggcgcgccgcggccgc

SEQ ID NO: 672 - DNA, 4624 bp, synthetic construct
  source 1..4624: mol_type = other DNA
caactttgtatagaaaagttggagggcctatttcccatgattccttcatatttgcatatacgatacaaggctgttagagagataattggaattaatttgactgtaaacacaaagatattagtacaaaatacgtgacgtagaaagtaataatttcttgggtagtttgcagttttaaaattatgttttaaaatggactatcatatgcttaccgtaacttgaaagtatttcgatttcttggctttatatatcttgtggaaaggacgaaacaccgtgcacacctcctggcgggcagctctgctgctgctgatgctgatgctgtgttctggcaatacctgcagcaacagcaacagcagcagcagggaggcctgccctgactgcccactttttgtttttcaagtttgtacaaaaaagcaggctgggttgcgccttttccaaggcagccctgggtttgcgcagggacgcggctgctctgggcgtggttccgggaaacgcagcggcgccgaccctgggtctcgcacattcttcacgtccgttcgcagcgtcacccggatcttcgccgctacccttgtgggccccccggcgacgcttcctgctccgcccctaagtcgggaaggttccttgcggttcgcggcgtgccggacgtgacaaacggaagccgcacgtctcactagtaccctcgcagacggacagcgccagggagcaatggcagcgcgccgaccgcgatgggctgtggccaatagcggctgctcagcagggcgcgccgagagcagcggccgggaaggggcggtgcgggaggcggggtgtggggcggtagtgtgggccctgttcctgcccgcgcggtgttccgcattctgcaagcctccggagcgcacgtcggcagtcggctccctcgttgaccgaatcaccgacctctctccccaggacccagctttcttgtacaaagtgggccaccatggtgagcaagggcgaggagctgttcaccggggtggtgcccatcctggtcgagctggacggcgacgtaaacggccacaagttcagcgtgtccggcgagggcgagggcgatgccacctacggcaagctgaccctgaagttcatctgcaccaccggcaagctgcccgtgccctggcccaccctcgtgaccaccctgacctacggcgtgcagtgcttcagccgctaccccgaccacatgaagcagcacgacttcttcaagtccgccatgcccgaaggctacgtccaggagcgcaccatcttcttcaaggacgacggcaactacaagacccgcgccgaggtgaagttcgagggcgacaccctggtgaaccgcatcgagctgaagggcatcgacttcaaggaggacggcaacatcctggggcacaagctggagtacaactacaacagccacaacgtctatatcatggccgacaagcagaagaacggcatcaaggtgaacttcaagatccgccacaacatcgaggacggcagcgtgcagctcgccgaccactaccagcagaacacccccatcggcgacggccccgtgctgctgcccgacaaccactacctgagcacccagtccgccctgagcaaagaccccaacgagaagcgcgatcacatggtcctgctggagttcgtgaccgccgccgggatcactctcggcatggacgagctgtacaagggaagcggagagggcaggggaagtcttctaacatgcggggacgtggaggaaaatcccggccccatgaccgagtacaagcccacggtgcgcctcgccacccgcgacgacgtccccagggccgtacgcaccctcgccgccgcgttcgccgactaccccgccacgcgccacaccgtcgatccggaccgccacatcgagcgggtcaccgagctgcaagaactcttcctcacgcgcgtcgggctcgacatcggcaaggtgtgggtcgcggacgacggcgccgcggtggcggtctggaccacgccggagagcgtcgaagcgggggcggtgttcgccgagatcggcccgcgcatggccgagttgagcggttcccggctggccgcgcagcaacagatggaaggcctcctggcgccgcaccggcccaaggagcccgcgtggttcctggccaccgtcggcgtctcgcccgaccaccagggcaagggtctgggcagcgccgtcgtgctccccggagtggaggcggccgagcgcgccggggtgcccgccttcctggagacctccgcgccccgcaacctccccttctacgagcggctcggcttcaccgtcaccgccgacgtcgaggtgcccgaaggaccgcgcacctggtgcatgacccgcaagcccggtgcctgacaactttattatacatagttgatggccggccgcttcgagcagacatgataagatacattgatgagtttggacaaaccacaactagaatgcagtgaaaaaaatgctttatttgtgaaatttgtgatgctattgctttatttgtaaccattataagctgcaataaacaagttaacaacaacaattgcattcattttatgtttcaggttcagggggaggtgtgggaggttttttaaagcaagtaaaacctctacaaatgtggtagcggccgcggcgctcttccgcttcctcgctcactgactcgctgcgctcggtcgttcggctgcggcgagcggtatcagctcactcaaaggcggtaatacggttatccacagaatcaggggataacgcaggaaagaacatgtgagcaaaaggccagcaaaaggccaggaaccgtaaaaaggccgcgttgctggcgtttttccataggctccgcccccctgacgagcatcacaaaaatcgacgctcaagtcagaggtggcgaaacccgacaggactataaagataccaggcgtttccccctggaagctccctcgtgcgctctcctgttccgaccctgccgcttaccggatacctgtccgcctttctctcttcgggaagcgtggcgctttctcatagctcacgctgtaggtatctcagttcggtgtaggtcgttcgctccaagctgggctgtgtgcacgaaccccccgttcagcccgaccgctgcgccttatccggtaactatcgtcttgagtccaacccggtaagacacgacttatcgccactggcagcagccactggtaacaggattagcagagcgaggtatgtaggcggtgctacagagttcttgaagtggtggcctaactacggctacactagaagaacagtatttggtatctgcgctctgctgaagccagttaccttcggaaaaagagttggtagctcttgatccggcaaacaaaccaccgctggtagcggtggtttttttgtttgcaagcagcagattacgcgcagaaaaaaaggatctcaagaagatcctttgatcttttctacggggtctgacgctcagtggaacgaaaactcacgttaagggattttggtcatgagattatcaaaaaggatcttcacctagatccttttaaattaaaaatgaagttttaaatcaatctaaagtatatatgagtaaacttggtctgacagttaccaatgcttaatcagtgaggcacctatctcagcgatctgtctatttcgttcatccatagttgcctgactccccgtcgtgtagataactacgatacgggagggcttaccatctggccccagtgctgcaatgataccgcgagacccacgctcaccggctccagatttatcagcaataaaccagccagccggaagggccgagcgcagaagtggtcctgcaactttatccgcctccatccagtctattaattgttgccgggaagctagagtaagtagttcgccagttaatagtttgcgcaacgttgttgccattgctacaggcatcgtggtgtcacgctcgtcgtttggtatggcttcattcagctccggttcccaacgatcaaggcgagttacatgatcccccatgttgtgcaaaaaagcggttagctccttcggtcctccgatcgttgtcagaagtaagttggccgcagtgttatcactcatggttatggcagcactgcataattctcttactgtcatgccatccgtaagatgcttttctgtgactggtgagtactcaaccaagtcattctgagaatagtgtatgcggcgaccgagttgctcttgcccggcgtcaatacgggataataccgcgccacatagcagaactttaaaagtgctcatcattggaaaacgttcttcggggcgaaaactctcaaggatcttaccgctgttgagatccagttcgatgtaacccactcgtgcacccaactgatcttcagcatcttttactttcaccagcgtttctgggtgagcaaaaacaggaaggcaaaatgccgcaaaaaagggaataagggcgacacggaaatgttgaatactcatactcttcctttttcaatattattgaagcatttatcagggttattgtctcatgagcggatacatatttgaatgtatttagaaaaataaacaaataggggttccgcgcacatttccccgaaaagtgccacctgacgtctaagaaaccattattatcatgacattaacctataaaaataggcgtatcacgaggccctttcgtcggcgcgccgcggccgc

SEQ ID NO: 673 - DNA, 4624 bp, synthetic construct
  source 1..4624: mol_type = other DNA
caactttgtatagaaaagttggagggcctatttcccatgattccttcatatttgcatatacgatacaaggctgttagagagataattggaattaatttgactgtaaacacaaagatattagtacaaaatacgtgacgtagaaagtaataatttcttgggtagtttgcagttttaaaattatgttttaaaatggactatcatatgcttaccgtaacttgaaagtatttcgatttcttggctttatatatcttgtggaaaggacgaaacaccgtgcacacctcctggcgggcagctctgctgctgctgcaactgctgctgtgttctggcaatacctgcagcagcagaagcagcagcagcagggaggcctgccctgactgcccactttttgtttttcaagtttgtacaaaaaagcaggctgggttgcgccttttccaaggcagccctgggtttgcgcagggacgcggctgctctgggcgtggttccgggaaacgcagcggcgccgaccctgggtctcgcacattcttcacgtccgttcgcagcgtcacccggatcttcgccgctacccttgtgggccccccggcgacgcttcctgctccgcccctaagtcgggaaggttccttgcggttcgcggcgtgccggacgtgacaaacggaagccgcacgtctcactagtaccctcgcagacggacagcgccagggagcaatggcagcgcgccgaccgcgatgggctgtggccaatagcggctgctcagcagggcgcgccgagagcagcggccgggaaggggcggtgcgggaggcggggtgtggggcggtagtgtgggccctgttcctgcccgcgcggtgttccgcattctgcaagcctccggagcgcacgtcggcagtcggctccctcgttgaccgaatcaccgacctctctccccaggacccagctttcttgtacaaagtgggccaccatggtgagcaagggcgaggagctgttcaccggggtggtgcccatcctggtcgagctggacggcgacgtaaacggccacaagttcagcgtgtccggcgagggcgagggcgatgccacctacggcaagctgaccctgaagttcatctgcaccaccggcaagctgcccgtgccctggcccaccctcgtgaccaccctgacctacggcgtgcagtgcttcagccgctaccccgaccacatgaagcagcacgacttcttcaagtccgccatgcccgaaggctacgtccaggagcgcaccatcttcttcaaggacgacggcaactacaagacccgcgccgaggtgaagttcgagggcgacaccctggtgaaccgcatcgagctgaagggcatcgacttcaaggaggacggcaacatcctggggcacaagctggagtacaactacaacagccacaacgtctatatcatggccgacaagcagaagaacggcatcaaggtgaacttcaagatccgccacaacatcgaggacggcagcgtgcagctcgccgaccactaccagcagaacacccccatcggcgacggccccgtgctgctgcccgacaaccactacctgagcacccagtccgccctgagcaaagaccccaacgagaagcgcgatcacatggtcctgctggagttcgtgaccgccgccgggatcactctcggcatggacgagctgtacaagggaagcggagagggcaggggaagtcttctaacatgcggggacgtggaggaaaatcccggccccatgaccgagtacaagcccacggtgcgcctcgccacccgcgacgacgtccccagggccgtacgcaccctcgccgccgcgttcgccgactaccccgccacgcgccacaccgtcgatccggaccgccacatcgagcgggtcaccgagctgcaagaactcttcctcacgcgcgtcgggctcgacatcggcaaggtgtgggtcgcggacgacggcgccgcggtggcggtctggaccacgccggagagcgtcgaagcgggggcggtgttcgccgagatcggcccgcgcatggccgagttgagcggttcccggctggccgcgcagcaacagatggaaggcctcctggcgccgcaccggcccaaggagcccgcgtggttcctggccaccgtcggcgtctcgcccgaccaccagggcaagggtctgggcagcgccgtcgtgctccccggagtggaggcggccgagcgcgccggggtgcccgccttcctggagacctccgcgccccgcaacctccccttctacgagcggctcggcttcaccgtcaccgccgacgtcgaggtgcccgaaggaccgcgcacctggtgcatgacccgcaagcccggtgcctgacaactttattatacatagttgatggccggccgcttcgagcagacatgataagatacattgatgagtttggacaaaccacaactagaatgcagtgaaaaaaatgctttatttgtgaaatttgtgatgctattgctttatttgtaaccattataagctgcaataaacaagttaacaacaacaattgcattcattttatgtttcaggttcagggggaggtgtgggaggttttttaaagcaagtaaaacctctacaaatgtggtagcggccgcggcgctcttccgcttcctcgctcactgactcgctgcgctcggtcgttcggctgcggcgagcggtatcagctcactcaaaggcggtaatacggttatccacagaatcaggggataacgcaggaaagaacatgtgagcaaaaggccagcaaaaggccaggaaccgtaaaaaggccgcgttgctggcgtttttccataggctccgcccccctgacgagcatcacaaaaatcgacgctcaagtcagaggtggcgaaacccgacaggactataaagataccaggcgtttccccctggaagctccctcgtgcgctctcctgttccgaccctgccgcttaccggatacctgtccgcctttctctcttcgggaagcgtggcgctttctcatagctcacgctgtaggtatctcagttcggtgtaggtcgttcgctccaagctgggctgtgtgcacgaaccccccgttcagcccgaccgctgcgccttatccggtaactatcgtcttgagtccaacccggtaagacacgacttatcgccactggcagcagccactggtaacaggattagcagagcgaggtatgtaggcggtgctacagagttcttgaagtggtggcctaactacggctacactagaagaacagtatttggtatctgcgctctgctgaagccagttaccttcggaaaaagagttggtagctcttgatccggcaaacaaaccaccgctggtagcggtggtttttttgtttgcaagcagcagattacgcgcagaaaaaaaggatctcaagaagatcctttgatcttttctacggggtctgacgctcagtggaacgaaaactcacgttaagggattttggtcatgagattatcaaaaaggatcttcacctagatccttttaaattaaaaatgaagttttaaatcaatctaaagtatatatgagtaaacttggtctgacagttaccaatgcttaatcagtgaggcacctatctcagcgatctgtctatttcgttcatccatagttgcctgactccccgtcgtgtagataactacgatacgggagggcttaccatctggccccagtgctgcaatgataccgcgagacccacgctcaccggctccagatttatcagcaataaaccagccagccggaagggccgagcgcagaagtggtcctgcaactttatccgcctccatccagtctattaattgttgccgggaagctagagtaagtagttcgccagttaatagtttgcgcaacgttgttgccattgctacaggcatcgtggtgtcacgctcgtcgtttggtatggcttcattcagctccggttcccaacgatcaaggcgagttacatgatcccccatgttgtgcaaaaaagcggttagctccttcggtcctccgatcgttgtcagaagtaagttggccgcagtgttatcactcatggttatggcagcactgcataattctcttactgtcatgccatccgtaagatgcttttctgtgactggtgagtactcaaccaagtcattctgagaatagtgtatgcggcgaccgagttgctcttgcccggcgtcaatacgggataataccgcgccacatagcagaactttaaaagtgctcatcattggaaaacgttcttcggggcgaaaactctcaaggatcttaccgctgttgagatccagttcgatgtaacccactcgtgcacccaactgatcttcagcatcttttactttcaccagcgtttctgggtgagcaaaaacaggaaggcaaaatgccgcaaaaaagggaataagggcgacacggaaatgttgaatactcatactcttcctttttcaatattattgaagcatttatcagggttattgtctcatgagcggatacatatttgaatgtatttagaaaaataaacaaataggggttccgcgcacatttccccgaaaagtgccacctgacgtctaagaaaccattattatcatgacattaacctataaaaataggcgtatcacgaggccctttcgtcggcgcgccgcggccgc

SEQ ID NO: 674 - DNA, 4624 bp, synthetic construct
  source 1..4624: mol_type = other DNA
caactttgtatagaaaagttggagggcctatttcccatgattccttcatatttgcatatacgatacaaggctgttagagagataattggaattaatttgactgtaaacacaaagatattagtacaaaatacgtgacgtagaaagtaataatttcttgggtagtttgcagttttaaaattatgttttaaaatggactatcatatgcttaccgtaacttgaaagtatttcgatttcttggctttatatatcttgtggaaaggacgaaacaccgtgcacacctcctggcgggcagctctgctgctgctgcagatgctgctgtgttctggcaatacctgcagcagcaacagcagcagcagcagggaggcctgccctgactgcccactttttgtttttcaagtttgtacaaaaaagcaggctgggttgcgccttttccaaggcagccctgggtttgcgcagggacgcggctgctctgggcgtggttccgggaaacgcagcggcgccgaccctgggtctcgcacattcttcacgtccgttcgcagcgtcacccggatcttcgccgctacccttgtgggccccccggcgacgcttcctgctccgcccctaagtcgggaaggttccttgcggttcgcggcgtgccggacgtgacaaacggaagccgcacgtctcactagtaccctcgcagacggacagcgccagggagcaatggcagcgcgccgaccgcgatgggctgtggccaatagcggctgctcagcagggcgcgccgagagcagcggccgggaaggggcggtgcgggaggcggggtgtggggcggtagtgtgggccctgttcctgcccgcgcggtgttccgcattctgcaagcctccggagcgcacgtcggcagtcggctccctcgttgaccgaatcaccgacctctctccccaggacccagctttcttgtacaaagtgggccaccatggtgagcaagggcgaggagctgttcaccggggtggtgcccatcctggtcgagctggacggcgacgtaaacggccacaagttcagcgtgtccggcgagggcgagggcgatgccacctacggcaagctgaccctgaagttcatctgcaccaccggcaagctgcccgtgccctggcccaccctcgtgaccaccctgacctacggcgtgcagtgcttcagccgctaccccgaccacatgaagcagcacgacttcttcaagtccgccatgcccgaaggctacgtccaggagcgcaccatcttcttcaaggacgacggcaactacaagacccgcgccgaggtgaagttcgagggcgacaccctggtgaaccgcatcgagctgaagggcatcgacttcaaggaggacggcaacatcctggggcacaagctggagtacaactacaacagccacaacgtctatatcatggccgacaagcagaagaacggcatcaaggtgaacttcaagatccgccacaacatcgaggacggcagcgtgcagctcgccgaccactaccagcagaacacccccatcggcgacggccccgtgctgctgcccgacaaccactacctgagcacccagtccgccctgagcaaagaccccaacgagaagcgcgatcacatggtcctgctggagttcgtgaccgccgccgggatcactctcggcatggacgagctgtacaagggaagcggagagggcaggggaagtcttctaacatgcggggacgtggaggaaaatcccggccccatgaccgagtacaagcccacggtgcgcctcgccacccgcgacgacgtccccagggccgtacgcaccctcgccgccgcgttcgccgactaccccgccacgcgccacaccgtcgatccggaccgccacatcgagcgggtcaccgagctgcaagaactcttcctcacgcgcgtcgggctcgacatcggcaaggtgtgggtcgcggacgacggcgccgcggtggcggtctggaccacgccggagagcgtcgaagcgggggcggtgttcgccgagatcggcccgcgcatggccgagttgagcggttcccggctggccgcgcagcaacagatggaaggcctcctggcgccgcaccggcccaaggagcccgcgtggttcctggccaccgtcggcgtctcgcccgaccaccagggcaagggtctgggcagcgccgtcgtgctccccggagtggaggcggccgagcgcgccggggtgcccgccttcctggagacctccgcgccccgcaacctccccttctacgagcggctcggcttcaccgtcaccgccgacgtcgaggtgcccgaaggaccgcgcacctggtgcatgacccgcaagcccggtgcctgacaactttattatacatagttgatggccggccgcttcgagcagacatgataagatacattgatgagtttggacaaaccacaactagaatgcagtgaaaaaaatgctttatttgtgaaatttgtgatgctattgctttatttgtaaccattataagctgcaataaacaagttaacaacaacaattgcattcattttatgtttcaggttcagggggaggtgtgggaggttttttaaagcaagtaaaacctctacaaatgtggtagcggccgcggcgctcttccgcttcctcgctcactgactcgctgcgctcggtcgttcggctgcggcgagcggtatcagctcactcaaaggcggtaatacggttatccacagaatcaggggataacgcaggaaagaacatgtgagcaaaaggccagcaaaaggccaggaaccgtaaaaaggccgcgttgctggcgtttttccataggctccgcccccctgacgagcatcacaaaaatcgacgctcaagtcagaggtggcgaaacccgacaggactataaagataccaggcgtttccccctggaagctccctcgtgcgctctcctgttccgaccctgccgcttaccggatacctgtccgcctttctctcttcgggaagcgtggcgctttctcatagctcacgctgtaggtatctcagttcggtgtaggtcgttcgctccaagctgggctgtgtgcacgaaccccccgttcagcccgaccgctgcgccttatccggtaactatcgtcttgagtccaacccggtaagacacgacttatcgccactggcagcagccactggtaacaggattagcagagcgaggtatgtaggcggtgctacagagttcttgaagtggtggcctaactacggctacactagaagaacagtatttggtatctgcgctctgctgaagccagttaccttcggaaaaagagttggtagctcttgatccggcaaacaaaccaccgctggtagcggtggtttttttgtttgcaagcagcagattacgcgcagaaaaaaaggatctcaagaagatcctttgatcttttctacggggtctgacgctcagtggaacgaaaactcacgttaagggattttggtcatgagattatcaaaaaggatcttcacctagatccttttaaattaaaaatgaagttttaaatcaatctaaagtatatatgagtaaacttggtctgacagttaccaatgcttaatcagtgaggcacctatctcagcgatctgtctatttcgttcatccatagttgcctgactccccgtcgtgtagataactacgatacgggagggcttaccatctggccccagtgctgcaatgataccgcgagacccacgctcaccggctccagatttatcagcaataaaccagccagccggaagggccgagcgcagaagtggtcctgcaactttatccgcctccatccagtctattaattgttgccgggaagctagagtaagtagttcgccagttaatagtttgcgcaacgttgttgccattgctacaggcatcgtggtgtcacgctcgtcgtttggtatggcttcattcagctccggttcccaacgatcaaggcgagttacatgatcccccatgttgtgcaaaaaagcggttagctccttcggtcctccgatcgttgtcagaagtaagttggccgcagtgttatcactcatggttatggcagcactgcataattctcttactgtcatgccatccgtaagatgcttttctgtgactggtgagtactcaaccaagtcattctgagaatagtgtatgcggcgaccgagttgctcttgcccggcgtcaatacgggataataccgcgccacatagcagaactttaaaagtgctcatcattggaaaacgttcttcggggcgaaaactctcaaggatcttaccgctgttgagatccagttcgatgtaacccactcgtgcacccaactgatcttcagcatcttttactttcaccagcgtttctgggtgagcaaaaacaggaaggcaaaatgccgcaaaaaagggaataagggcgacacggaaatgttgaatactcatactcttcctttttcaatattattgaagcatttatcagggttattgtctcatgagcggatacatatttgaatgtatttagaaaaataaacaaataggggttccgcgcacatttccccgaaaagtgccacctgacgtctaagaaaccattattatcatgacattaacctataaaaataggcgtatcacgaggccctttcgtcggcgcgccgcggccgc

SEQ ID NO: 675 - DNA, 4624 bp, synthetic construct
  source 1..4624: mol_type = other DNA
caactttgtatagaaaagttggagggcctatttcccatgattccttcatatttgcatatacgatacaaggctgttagagagataattggaattaatttgactgtaaacacaaagatattagtacaaaatacgtgacgtagaaagtaataatttcttgggtagtttgcagttttaaaattatgttttaaaatggactatcatatgcttaccgtaacttgaaagtatttcgatttcttggctttatatatcttgtggaaaggacgaaacaccgtgcacacctcctggcgggcagctctgctgctgctgcagcagctgctgtgttctggcaatacctgcagcagcagcagcagcagcagcagggaggcctgccctgactgcccactttttgtttttcaagtttgtacaaaaaagcaggctgggttgcgccttttccaaggcagccctgggtttgcgcagggacgcggctgctctgggcgtggttccgggaaacgcagcggcgccgaccctgggtctcgcacattcttcacgtccgttcgcagcgtcacccggatcttcgccgctacccttgtgggccccccggcgacgcttcctgctccgcccctaagtcgggaaggttccttgcggttcgcggcgtgccggacgtgacaaacggaagccgcacgtctcactagtaccctcgcagacggacagcgccagggagcaatggcagcgcgccgaccgcgatgggctgtggccaatagcggctgctcagcagggcgcgccgagagcagcggccgggaaggggcggtgcgggaggcggggtgtggggcggtagtgtgggccctgttcctgcccgcgcggtgttccgcattctgcaagcctccggagcgcacgtcggcagtcggctccctcgttgaccgaatcaccgacctctctccccaggacccagctttcttgtacaaagtgggccaccatggtgagcaagggcgaggagctgttcaccggggtggtgcccatcctggtcgagctggacggcgacgtaaacggccacaagttcagcgtgtccggcgagggcgagggcgatgccacctacggcaagctgaccctgaagttcatctgcaccaccggcaagctgcccgtgccctggcccaccctcgtgaccaccctgacctacggcgtgcagtgcttcagccgctaccccgaccacatgaagcagcacgacttcttcaagtccgccatgcccgaaggctacgtccaggagcgcaccatcttcttcaaggacgacggcaactacaagacccgcgccgaggtgaagttcgagggcgacaccctggtgaaccgcatcgagctgaagggcatcgacttcaaggaggacggcaacatcctggggcacaagctggagtacaactacaacagccacaacgtctatatcatggccgacaagcagaagaacggcatcaaggtgaacttcaagatccgccacaacatcgaggacggcagcgtgcagctcgccgaccactaccagcagaacacccccatcggcgacggccccgtgctgctgcccgacaaccactacctgagcacccagtccgccctgagcaaagaccccaacgagaagcgcgatcacatggtcctgctggagttcgtgaccgccgccgggatcactctcggcatggacgagctgtacaagggaagcggagagggcaggggaagtcttctaacatgcggggacgtggaggaaaatcccggccccatgaccgagtacaagcccacggtgcgcctcgccacccgcgacgacgtccccagggccgtacgcaccctcgccgccgcgttcgccgactaccccgccacgcgccacaccgtcgatccggaccgccacatcgagcgggtcaccgagctgcaagaactcttcctcacgcgcgtcgggctcgacatcggcaaggtgtgggtcgcggacgacggcgccgcggtggcggtctggaccacgccggagagcgtcgaagcgggggcggtgttcgccgagatcggcccgcgcatggccgagttgagcggttcccggctggccgcgcagcaacagatggaaggcctcctggcgccgcaccggcccaaggagcccgcgtggttcctggccaccgtcggcgtctcgcccgaccaccagggcaagggtctgggcagcgccgtcgtgctccccggagtggaggcggccgagcgcgccggggtgcccgccttcctggagacctccgcgccccgcaacctccccttctacgagcggctcggcttcaccgtcaccgccgacgtcgaggtgcccgaaggaccgcgcacctggtgcatgacccgcaagcccggtgcctgacaactttattatacatagttgatggccggccgcttcgagcagacatgataagatacattgatgagtttggacaaaccacaactagaatgcagtgaaaaaaatgctttatttgtgaaatttgtgatgctattgctttatttgtaaccattataagctgcaataaacaagttaacaacaacaattgcattcattttatgtttcaggttcagggggaggtgtgggaggttttttaaagcaagtaaaacctctacaaatgtggtagcggccgcggcgctcttccgcttcctcgctcactgactcgctgcgctcggtcgttcggctgcggcgagcggtatcagctcactcaaaggcggtaatacggttatccacagaatcaggggataacgcaggaaagaacatgtgagcaaaaggccagcaaaaggccaggaaccgtaaaaaggccgcgttgctggcgtttttccataggctccgcccccctgacgagcatcacaaaaatcgacgctcaagtcagaggtggcgaaacccgacaggactataaagataccaggcgtttccccctggaagctccctcgtgcgctctcctgttccgaccctgccgcttaccggatacctgtccgcctttctctcttcgggaagcgtggcgctttctcatagctcacgctgtaggtatctcagttcggtgtaggtcgttcgctccaagctgggctgtgtgcacgaaccccccgttcagcccgaccgctgcgccttatccggtaactatcgtcttgagtccaacccggtaagacacgacttatcgccactggcagcagccactggtaacaggattagcagagcgaggtatgtaggcggtgctacagagttcttgaagtggtggcctaactacggctacactagaagaacagtatttggtatctgcgctctgctgaagccagttaccttcggaaaaagagttggtagctcttgatccggcaaacaaaccaccgctggtagcggtggtttttttgtttgcaagcagcagattacgcgcagaaaaaaaggatctcaagaagatcctttgatcttttctacggggtctgacgctcagtggaacgaaaactcacgttaagggattttggtcatgagattatcaaaaaggatcttcacctagatccttttaaattaaaaatgaagttttaaatcaatctaaagtatatatgagtaaacttggtctgacagttaccaatgcttaatcagtgaggcacctatctcagcgatctgtctatttcgttcatccatagttgcctgactccccgtcgtgtagataactacgatacgggagggcttaccatctggccccagtgctgcaatgataccgcgagacccacgctcaccggctccagatttatcagcaataaaccagccagccggaagggccgagcgcagaagtggtcctgcaactttatccgcctccatccagtctattaattgttgccgggaagctagagtaagtagttcgccagttaatagtttgcgcaacgttgttgccattgctacaggcatcgtggtgtcacgctcgtcgtttggtatggcttcattcagctccggttcccaacgatcaaggcgagttacatgatcccccatgttgtgcaaaaaagcggttagctccttcggtcctccgatcgttgtcagaagtaagttggccgcagtgttatcactcatggttatggcagcactgcataattctcttactgtcatgccatccgtaagatgcttttctgtgactggtgagtactcaaccaagtcattctgagaatagtgtatgcggcgaccgagttgctcttgcccggcgtcaatacgggataataccgcgccacatagcagaactttaaaagtgctcatcattggaaaacgttcttcggggcgaaaactctcaaggatcttaccgctgttgagatccagttcgatgtaacccactcgtgcacccaactgatcttcagcatcttttactttcaccagcgtttctgggtgagcaaaaacaggaaggcaaaatgccgcaaaaaagggaataagggcgacacggaaatgttgaatactcatactcttcctttttcaatattattgaagcatttatcagggttattgtctcatgagcggatacatatttgaatgtatttagaaaaataaacaaataggggttccgcgcacatttccccgaaaagtgccacctgacgtctaagaaaccattattatcatgacattaacctataaaaataggcgtatcacgaggccctttcgtcggcgcgccgcggccgc

SEQ ID NO: 676 - DNA, 4624 bp, synthetic construct
  source 1..4624: mol_type = other DNA
caactttgtatagaaaagttggagggcctatttcccatgattccttcatatttgcatatacgatacaaggctgttagagagataattggaattaatttgactgtaaacacaaagatattagtacaaaatacgtgacgtagaaagtaataatttcttgggtagtttgcagttttaaaattatgttttaaaatggactatcatatgcttaccgtaacttgaaagtatttcgatttcttggctttatatatcttgtggaaaggacgaaacaccgtgcacacctcctggcgggcagctctgctgctgctgcagctactgctgtgttctggcaatacctgcagcagaagcagcagcagcagcagggaggcctgccctgactgcccactttttgtttttcaagtttgtacaaaaaagcaggctgggttgcgccttttccaaggcagccctgggtttgcgcagggacgcggctgctctgggcgtggttccgggaaacgcagcggcgccgaccctgggtctcgcacattcttcacgtccgttcgcagcgtcacccggatcttcgccgctacccttgtgggccccccggcgacgcttcctgctccgcccctaagtcgggaaggttccttgcggttcgcggcgtgccggacgtgacaaacggaagccgcacgtctcactagtaccctcgcagacggacagcgccagggagcaatggcagcgcgccgaccgcgatgggctgtggccaatagcggctgctcagcagggcgcgccgagagcagcggccgggaaggggcggtgcgggaggcggggtgtggggcggtagtgtgggccctgttcctgcccgcgcggtgttccgcattctgcaagcctccggagcgcacgtcggcagtcggctccctcgttgaccgaatcaccgacctctctccccaggacccagctttcttgtacaaagtgggccaccatggtgagcaagggcgaggagctgttcaccggggtggtgcccatcctggtcgagctggacggcgacgtaaacggccacaagttcagcgtgtccggcgagggcgagggcgatgccacctacggcaagctgaccctgaagttcatctgcaccaccggcaagctgcccgtgccctggcccaccctcgtgaccaccctgacctacggcgtgcagtgcttcagccgctaccccgaccacatgaagcagcacgacttcttcaagtccgccatgcccgaaggctacgtccaggagcgcaccatcttcttcaaggacgacggcaactacaagacccgcgccgaggtgaagttcgagggcgacaccctggtgaaccgcatcgagctgaagggcatcgacttcaaggaggacggcaacatcctggggcacaagctggagtacaactacaacagccacaacgtctatatcatggccgacaagcagaagaacggcatcaaggtgaacttcaagatccgccacaacatcgaggacggcagcgtgcagctcgccgaccactaccagcagaacacccccatcggcgacggccccgtgctgctgcccgacaaccactacctgagcacccagtccgccctgagcaaagaccccaacgagaagcgcgatcacatggtcctgctggagttcgtgaccgccgccgggatcactctcggcatggacgagctgtacaagggaagcggagagggcaggggaagtcttctaacatgcggggacgtggaggaaaatcccggccccatgaccgagtacaagcccacggtgcgcctcgccacccgcgacgacgtccccagggccgtacgcaccctcgccgccgcgttcgccgactaccccgccacgcgccacaccgtcgatccggaccgccacatcgagcgggtcaccgagctgcaagaactcttcctcacgcgcgtcgggctcgacatcggcaaggtgtgggtcgcggacgacggcgccgcggtggcggtctggaccacgccggagagcgtcgaagcgggggcggtgttcgccgagatcggcccgcgcatggccgagttgagcggttcccggctggccgcgcagcaacagatggaaggcctcctggcgccgcaccggcccaaggagcccgcgtggttcctggccaccgtcggcgtctcgcccgaccaccagggcaagggtctgggcagcgccgtcgtgctccccggagtggaggcggccgagcgcgccggggtgcccgccttcctggagacctccgcgccccgcaacctccccttctacgagcggctcggcttcaccgtcaccgccgacgtcgaggtgcccgaaggaccgcgcacctggtgcatgacccgcaagcccggtgcctgacaactttattatacatagttgatggccggccgcttcgagcagacatgataagatacattgatgagtttggacaaaccacaactagaatgcagtgaaaaaaatgctttatttgtgaaatttgtgatgctattgctttatttgtaaccattataagctgcaataaacaagttaacaacaacaattgcattcattttatgtttcaggttcagggggaggtgtgggaggttttttaaagcaagtaaaacctctacaaatgtggtagcggccgcggcgctcttccgcttcctcgctcactgactcgctgcgctcggtcgttcggctgcggcgagcggtatcagctcactcaaaggcggtaatacggttatccacagaatcaggggataacgcaggaaagaacatgtgagcaaaaggccagcaaaaggccaggaaccgtaaaaaggccgcgttgctggcgtttttccataggctccgcccccctgacgagcatcacaaaaatcgacgctcaagtcagaggtggcgaaacccgacaggactataaagataccaggcgtttccccctggaagctccctcgtgcgctctcctgttccgaccctgccgcttaccggatacctgtccgcctttctctcttcgggaagcgtggcgctttctcatagctcacgctgtaggtatctcagttcggtgtaggtcgttcgctccaagctgggctgtgtgcacgaaccccccgttcagcccgaccgctgcgccttatccggtaactatcgtcttgagtccaacccggtaagacacgacttatcgccactggcagcagccactggtaacaggattagcagagcgaggtatgtaggcggtgctacagagttcttgaagtggtggcctaactacggctacactagaagaacagtatttggtatctgcgctctgctgaagccagttaccttcggaaaaagagttggtagctcttgatccggcaaacaaaccaccgctggtagcggtggtttttttgtttgcaagcagcagattacgcgcagaaaaaaaggatctcaagaagatcctttgatcttttctacggggtctgacgctcagtggaacgaaaactcacgttaagggattttggtcatgagattatcaaaaaggatcttcacctagatccttttaaattaaaaatgaagttttaaatcaatctaaagtatatatgagtaaacttggtctgacagttaccaatgcttaatcagtgaggcacctatctcagcgatctgtctatttcgttcatccatagttgcctgactccccgtcgtgtagataactacgatacgggagggcttaccatctggccccagtgctgcaatgataccgcgagacccacgctcaccggctccagatttatcagcaataaaccagccagccggaagggccgagcgcagaagtggtcctgcaactttatccgcctccatccagtctattaattgttgccgggaagctagagtaagtagttcgccagttaatagtttgcgcaacgttgttgccattgctacaggcatcgtggtgtcacgctcgtcgtttggtatggcttcattcagctccggttcccaacgatcaaggcgagttacatgatcccccatgttgtgcaaaaaagcggttagctccttcggtcctccgatcgttgtcagaagtaagttggccgcagtgttatcactcatggttatggcagcactgcataattctcttactgtcatgccatccgtaagatgcttttctgtgactggtgagtactcaaccaagtcattctgagaatagtgtatgcggcgaccgagttgctcttgcccggcgtcaatacgggataataccgcgccacatagcagaactttaaaagtgctcatcattggaaaacgttcttcggggcgaaaactctcaaggatcttaccgctgttgagatccagttcgatgtaacccactcgtgcacccaactgatcttcagcatcttttactttcaccagcgtttctgggtgagcaaaaacaggaaggcaaaatgccgcaaaaaagggaataagggcgacacggaaatgttgaatactcatactcttcctttttcaatattattgaagcatttatcagggttattgtctcatgagcggatacatatttgaatgtatttagaaaaataaacaaataggggttccgcgcacatttccccgaaaagtgccacctgacgtctaagaaaccattattatcatgacattaacctataaaaataggcgtatcacgaggccctttcgtcggcgcgccgcggccgc

SEQ ID NO: 677 - DNA, 4624 bp, synthetic construct
  source 1..4624: mol_type = other DNA
caactttgtatagaaaagttggagggcctatttcccatgattccttcatatttgcatatacgatacaaggctgttagagagataattggaattaatttgactgtaaacacaaagatattagtacaaaatacgtgacgtagaaagtaataatttcttgggtagtttgcagttttaaaattatgttttaaaatggactatcatatgcttaccgtaacttgaaagtatttcgatttcttggctttatatatcttgtggaaaggacgaaacaccgtgcacacctcctggcgggcagctctgctgctgctgcagctgatgctgtgttctggcaatacctgcagcaacagcagcagcagcagcagggaggcctgccctgactgcccactttttgtttttcaagtttgtacaaaaaagcaggctgggttgcgccttttccaaggcagccctgggtttgcgcagggacgcggctgctctgggcgtggttccgggaaacgcagcggcgccgaccctgggtctcgcacattcttcacgtccgttcgcagcgtcacccggatcttcgccgctacccttgtgggccccccggcgacgcttcctgctccgcccctaagtcgggaaggttccttgcggttcgcggcgtgccggacgtgacaaacggaagccgcacgtctcactagtaccctcgcagacggacagcgccagggagcaatggcagcgcgccgaccgcgatgggctgtggccaatagcggctgctcagcagggcgcgccgagagcagcggccgggaaggggcggtgcgggaggcggggtgtggggcggtagtgtgggccctgttcctgcccgcgcggtgttccgcattctgcaagcctccggagcgcacgtcggcagtcggctccctcgttgaccgaatcaccgacctctctccccaggacccagctttcttgtacaaagtgggccaccatggtgagcaagggcgaggagctgttcaccggggtggtgcccatcctggtcgagctggacggcgacgtaaacggccacaagttcagcgtgtccggcgagggcgagggcgatgccacctacggcaagctgaccctgaagttcatctgcaccaccggcaagctgcccgtgccctggcccaccctcgtgaccaccctgacctacggcgtgcagtgcttcagccgctaccccgaccacatgaagcagcacgacttcttcaagtccgccatgcccgaaggctacgtccaggagcgcaccatcttcttcaaggacgacggcaactacaagacccgcgccgaggtgaagttcgagggcgacaccctggtgaaccgcatcgagctgaagggcatcgacttcaaggaggacggcaacatcctggggcacaagctggagtacaactacaacagccacaacgtctatatcatggccgacaagcagaagaacggcatcaaggtgaacttcaagatccgccacaacatcgaggacggcagcgtgcagctcgccgaccactaccagcagaacacccccatcggcgacggccccgtgctgctgcccgacaaccactacctgagcacccagtccgccctgagcaaagaccccaacgagaagcgcgatcacatggtcctgctggagttcgtgaccgccgccgggatcactctcggcatggacgagctgtacaagggaagcggagagggcaggggaagtcttctaacatgcggggacgtggaggaaaatcccggccccatgaccgagtacaagcccacggtgcgcctcgccacccgcgacgacgtccccagggccgtacgcaccctcgccgccgcgttcgccgactaccccgccacgcgccacaccgtcgatccggaccgccacatcgagcgggtcaccgagctgcaagaactcttcctcacgcgcgtcgggctcgacatcggcaaggtgtgggtcgcggacgacggcgccgcggtggcggtctggaccacgccggagagcgtcgaagcgggggcggtgttcgccgagatcggcccgcgcatggccgagttgagcggttcccggctggccgcgcagcaacagatggaaggcctcctggcgccgcaccggcccaaggagcccgcgtggttcctggccaccgtcggcgtctcgcccgaccaccagggcaagggtctgggcagcgccgtcgtgctccccggagtggaggcggccgagcgcgccggggtgcccgccttcctggagacctccgcgccccgcaacctccccttctacgagcggctcggcttcaccgtcaccgccgacgtcgaggtgcccgaaggaccgcgcacctggtgcatgacccgcaagcccggtgcctgacaactttattatacatagttgatggccggccgcttcgagcagacatgataagatacattgatgagtttggacaaaccacaactagaatgcagtgaaaaaaatgctttatttgtgaaatttgtgatgctattgctttatttgtaaccattataagctgcaataaacaagttaacaacaacaattgcattcattttatgtttcaggttcagggggaggtgtgggaggttttttaaagcaagtaaaacctctacaaatgtggtagcggccgcggcgctcttccgcttcctcgctcactgactcgctgcgctcggtcgttcggctgcggcgagcggtatcagctcactcaaaggcggtaatacggttatccacagaatcaggggataacgcaggaaagaacatgtgagcaaaaggccagcaaaaggccaggaaccgtaaaaaggccgcgttgctggcgtttttccataggctccgcccccctgacgagcatcacaaaaatcgacgctcaagtcagaggtggcgaaacccgacaggactataaagataccaggcgtttccccctggaagctccctcgtgcgctctcctgttccgaccctgccgcttaccggatacctgtccgcctttctctcttcgggaagcgtggcgctttctcatagctcacgctgtaggtatctcagttcggtgtaggtcgttcgctccaagctgggctgtgtgcacgaaccccccgttcagcccgaccgctgcgccttatccggtaactatcgtcttgagtccaacccggtaagacacgacttatcgccactggcagcagccactggtaacaggattagcagagcgaggtatgtaggcggtgctacagagttcttgaagtggtggcctaactacggctacactagaagaacagtatttggtatctgcgctctgctgaagccagttaccttcggaaaaagagttggtagctcttgatccggcaaacaaaccaccgctggtagcggtggtttttttgtttgcaagcagcagattacgcgcagaaaaaaaggatctcaagaagatcctttgatcttttctacggggtctgacgctcagtggaacgaaaactcacgttaagggattttggtcatgagattatcaaaaaggatcttcacctagatccttttaaattaaaaatgaagttttaaatcaatctaaagtatatatgagtaaacttggtctgacagttaccaatgcttaatcagtgaggcacctatctcagcgatctgtctatttcgttcatccatagttgcctgactccccgtcgtgtagataactacgatacgggagggcttaccatctggccccagtgctgcaatgataccgcgagacccacgctcaccggctccagatttatcagcaataaaccagccagccggaagggccgagcgcagaagtggtcctgcaactttatccgcctccatccagtctattaattgttgccgggaagctagagtaagtagttcgccagttaatagtttgcgcaacgttgttgccattgctacaggcatcgtggtgtcacgctcgtcgtttggtatggcttcattcagctccggttcccaacgatcaaggcgagttacatgatcccccatgttgtgcaaaaaagcggttagctccttcggtcctccgatcgttgtcagaagtaagttggccgcagtgttatcactcatggttatggcagcactgcataattctcttactgtcatgccatccgtaagatgcttttctgtgactggtgagtactcaaccaagtcattctgagaatagtgtatgcggcgaccgagttgctcttgcccggcgtcaatacgggataataccgcgccacatagcagaactttaaaagtgctcatcattggaaaacgttcttcggggcgaaaactctcaaggatcttaccgctgttgagatccagttcgatgtaacccactcgtgcacccaactgatcttcagcatcttttactttcaccagcgtttctgggtgagcaaaaacaggaaggcaaaatgccgcaaaaaagggaataagggcgacacggaaatgttgaatactcatactcttcctttttcaatattattgaagcatttatcagggttattgtctcatgagcggatacatatttgaatgtatttagaaaaataaacaaataggggttccgcgcacatttccccgaaaagtgccacctgacgtctaagaaaccattattatcatgacattaacctataaaaataggcgtatcacgaggccctttcgtcggcgcgccgcggccgc

SEQ ID NO: 678 - DNA, 4624 bp, synthetic construct
  source 1..4624: mol_type = other DNA
caactttgtatagaaaagttggagggcctatttcccatgattccttcatatttgcatatacgatacaaggctgttagagagataattggaattaatttgactgtaaacacaaagatattagtacaaaatacgtgacgtagaaagtaataatttcttgggtagtttgcagttttaaaattatgttttaaaatggactatcatatgcttaccgtaacttgaaagtatttcgatttcttggctttatatatcttgtggaaaggacgaaacaccgtgcacacctcctggcgggcagctctgctgctgcagctgctgctgctgtgttctggcaatacctgcagcagcagcagcagcagcagcagggaggcctgccctgactgcccactttttgtttttcaagtttgtacaaaaaagcaggctgggttgcgccttttccaaggcagccctgggtttgcgcagggacgcggctgctctgggcgtggttccgggaaacgcagcggcgccgaccctgggtctcgcacattcttcacgtccgttcgcagcgtcacccggatcttcgccgctacccttgtgggccccccggcgacgcttcctgctccgcccctaagtcgggaaggttccttgcggttcgcggcgtgccggacgtgacaaacggaagccgcacgtctcactagtaccctcgcagacggacagcgccagggagcaatggcagcgcgccgaccgcgatgggctgtggccaatagcggctgctcagcagggcgcgccgagagcagcggccgggaaggggcggtgcgggaggcggggtgtggggcggtagtgtgggccctgttcctgcccgcgcggtgttccgcattctgcaagcctccggagcgcacgtcggcagtcggctccctcgttgaccgaatcaccgacctctctccccaggacccagctttcttgtacaaagtgggccaccatggtgagcaagggcgaggagctgttcaccggggtggtgcccatcctggtcgagctggacggcgacgtaaacggccacaagttcagcgtgtccggcgagggcgagggcgatgccacctacggcaagctgaccctgaagttcatctgcaccaccggcaagctgcccgtgccctggcccaccctcgtgaccaccctgacctacggcgtgcagtgcttcagccgctaccccgaccacatgaagcagcacgacttcttcaagtccgccatgcccgaaggctacgtccaggagcgcaccatcttcttcaaggacgacggcaactacaagacccgcgccgaggtgaagttcgagggcgacaccctggtgaaccgcatcgagctgaagggcatcgacttcaaggaggacggcaacatcctggggcacaagctggagtacaactacaacagccacaacgtctatatcatggccgacaagcagaagaacggcatcaaggtgaacttcaagatccgccacaacatcgaggacggcagcgtgcagctcgccgaccactaccagcagaacacccccatcggcgacggccccgtgctgctgcccgacaaccactacctgagcacccagtccgccctgagcaaagaccccaacgagaagcgcgatcacatggtcctgctggagttcgtgaccgccgccgggatcactctcggcatggacgagctgtacaagggaagcggagagggcaggggaagtcttctaacatgcggggacgtggaggaaaatcccggccccatgaccgagtacaagcccacggtgcgcctcgccacccgcgacgacgtccccagggccgtacgcaccctcgccgccgcgttcgccgactaccccgccacgcgccacaccgtcgatccggaccgccacatcgagcgggtcaccgagctgcaagaactcttcctcacgcgcgtcgggctcgacatcggcaaggtgtgggtcgcggacgacggcgccgcggtggcggtctggaccacgccggagagcgtcgaagcgggggcggtgttcgccgagatcggcccgcgcatggccgagttgagcggttcccggctggccgcgcagcaacagatggaaggcctcctggcgccgcaccggcccaaggagcccgcgtggttcctggccaccgtcggcgtctcgcccgaccaccagggcaagggtctgggcagcgccgtcgtgctccccggagtggaggcggccgagcgcgccggggtgcccgccttcctggagacctccgcgccccgcaacctccccttctacgagcggctcggcttcaccgtcaccgccgacgtcgaggtgcccgaaggaccgcgcacctggtgcatgacccgcaagcccggtgcctgacaactttattatacatagttgatggccggccgcttcgagcagacatgataagatacattgatgagtttggacaaaccacaactagaatgcagtgaaaaaaatgctttatttgtgaaatttgtgatgctattgctttatttgtaaccattataagctgcaataaacaagttaacaacaacaattgcattcattttatgtttcaggttcagggggaggtgtgggaggttttttaaagcaagtaaaacctctacaaatgtggtagcggccgcggcgctcttccgcttcctcgctcactgactcgctgcgctcggtcgttcggctgcggcgagcggtatcagctcactcaaaggcggtaatacggttatccacagaatcaggggataacgcaggaaagaacatgtgagcaaaaggccagcaaaaggccaggaaccgtaaaaaggccgcgttgctggcgtttttccataggctccgcccccctgacgagcatcacaaaaatcgacgctcaagtcagaggtggcgaaacccgacaggactataaagataccaggcgtttccccctggaagctccctcgtgcgctctcctgttccgaccctgccgcttaccggatacctgtccgcctttctctcttcgggaagcgtggcgctttctcatagctcacgctgtaggtatctcagttcggtgtaggtcgttcgctccaagctgggctgtgtgcacgaaccccccgttcagcccgaccgctgcgccttatccggtaactatcgtcttgagtccaacccggtaagacacgacttatcgccactggcagcagccactggtaacaggattagcagagcgaggtatgtaggcggtgctacagagttcttgaagtggtggcctaactacggctacactagaagaacagtatttggtatctgcgctctgctgaagccagttaccttcggaaaaagagttggtagctcttgatccggcaaacaaaccaccgctggtagcggtggtttttttgtttgcaagcagcagattacgcgcagaaaaaaaggatctcaagaagatcctttgatcttttctacggggtctgacgctcagtggaacgaaaactcacgttaagggattttggtcatgagattatcaaaaaggatcttcacctagatccttttaaattaaaaatgaagttttaaatcaatctaaagtatatatgagtaaacttggtctgacagttaccaatgcttaatcagtgaggcacctatctcagcgatctgtctatttcgttcatccatagttgcctgactccccgtcgtgtagataactacgatacgggagggcttaccatctggccccagtgctgcaatgataccgcgagacccacgctcaccggctccagatttatcagcaataaaccagccagccggaagggccgagcgcagaagtggtcctgcaactttatccgcctccatccagtctattaattgttgccgggaagctagagtaagtagttcgccagttaatagtttgcgcaacgttgttgccattgctacaggcatcgtggtgtcacgctcgtcgtttggtatggcttcattcagctccggttcccaacgatcaaggcgagttacatgatcccccatgttgtgcaaaaaagcggttagctccttcggtcctccgatcgttgtcagaagtaagttggccgcagtgttatcactcatggttatggcagcactgcataattctcttactgtcatgccatccgtaagatgcttttctgtgactggtgagtactcaaccaagtcattctgagaatagtgtatgcggcgaccgagttgctcttgcccggcgtcaatacgggataataccgcgccacatagcagaactttaaaagtgctcatcattggaaaacgttcttcggggcgaaaactctcaaggatcttaccgctgttgagatccagttcgatgtaacccactcgtgcacccaactgatcttcagcatcttttactttcaccagcgtttctgggtgagcaaaaacaggaaggcaaaatgccgcaaaaaagggaataagggcgacacggaaatgttgaatactcatactcttcctttttcaatattattgaagcatttatcagggttattgtctcatgagcggatacatatttgaatgtatttagaaaaataaacaaataggggttccgcgcacatttccccgaaaagtgccacctgacgtctaagaaaccattattatcatgacattaacctataaaaataggcgtatcacgaggccctttcgtcggcgcgccgcggccgc

SEQ ID NO: 679 - DNA, 4624 bp, synthetic construct
  source 1..4624: mol_type = other DNA
caactttgtatagaaaagttggagggcctatttcccatgattccttcatatttgcatatacgatacaaggctgttagagagataattggaattaatttgactgtaaacacaaagatattagtacaaaatacgtgacgtagaaagtaataatttcttgggtagtttgcagttttaaaattatgttttaaaatggactatcatatgcttaccgtaacttgaaagtatttcgatttcttggctttatatatcttgtggaaaggacgaaacaccgtgcacacctcctggcgggcagctctgctgctgcaactgctgctgctgtgttctggcaatacctgcagcagcagcagaagcagcagcagggaggcctgccctgactgcccactttttgtttttcaagtttgtacaaaaaagcaggctgggttgcgccttttccaaggcagccctgggtttgcgcagggacgcggctgctctgggcgtggttccgggaaacgcagcggcgccgaccctgggtctcgcacattcttcacgtccgttcgcagcgtcacccggatcttcgccgctacccttgtgggccccccggcgacgcttcctgctccgcccctaagtcgggaaggttccttgcggttcgcggcgtgccggacgtgacaaacggaagccgcacgtctcactagtaccctcgcagacggacagcgccagggagcaatggcagcgcgccgaccgcgatgggctgtggccaatagcggctgctcagcagggcgcgccgagagcagcggccgggaaggggcggtgcgggaggcggggtgtggggcggtagtgtgggccctgttcctgcccgcgcggtgttccgcattctgcaagcctccggagcgcacgtcggcagtcggctccctcgttgaccgaatcaccgacctctctccccaggacccagctttcttgtacaaagtgggccaccatggtgagcaagggcgaggagctgttcaccggggtggtgcccatcctggtcgagctggacggcgacgtaaacggccacaagttcagcgtgtccggcgagggcgagggcgatgccacctacggcaagctgaccctgaagttcatctgcaccaccggcaagctgcccgtgccctggcccaccctcgtgaccaccctgacctacggcgtgcagtgcttcagccgctaccccgaccacatgaagcagcacgacttcttcaagtccgccatgcccgaaggctacgtccaggagcgcaccatcttcttcaaggacgacggcaactacaagacccgcgccgaggtgaagttcgagggcgacaccctggtgaaccgcatcgagctgaagggcatcgacttcaaggaggacggcaacatcctggggcacaagctggagtacaactacaacagccacaacgtctatatcatggccgacaagcagaagaacggcatcaaggtgaacttcaagatccgccacaacatcgaggacggcagcgtgcagctcgccgaccactaccagcagaacacccccatcggcgacggccccgtgctgctgcccgacaaccactacctgagcacccagtccgccctgagcaaagaccccaacgagaagcgcgatcacatggtcctgctggagttcgtgaccgccgccgggatcactctcggcatggacgagctgtacaagggaagcggagagggcaggggaagtcttctaacatgcggggacgtggaggaaaatcccggccccatgaccgagtacaagcccacggtgcgcctcgccacccgcgacgacgtccccagggccgtacgcaccctcgccgccgcgttcgccgactaccccgccacgcgccacaccgtcgatccggaccgccacatcgagcgggtcaccgagctgcaagaactcttcctcacgcgcgtcgggctcgacatcggcaaggtgtgggtcgcggacgacggcgccgcggtggcggtctggaccacgccggagagcgtcgaagcgggggcggtgttcgccgagatcggcccgcgcatggccgagttgagcggttcccggctggccgcgcagcaacagatggaaggcctcctggcgccgcaccggcccaaggagcccgcgtggttcctggccaccgtcggcgtctcgcccgaccaccagggcaagggtctgggcagcgccgtcgtgctccccggagtggaggcggccgagcgcgccggggtgcccgccttcctggagacctccgcgccccgcaacctccccttctacgagcggctcggcttcaccgtcaccgccgacgtcgaggtgcccgaaggaccgcgcacctggtgcatgacccgcaagcccggtgcctgacaactttattatacatagttgatggccggccgcttcgagcagacatgataagatacattgatgagtttggacaaaccacaactagaatgcagtgaaaaaaatgctttatttgtgaaatttgtgatgctattgctttatttgtaaccattataagctgcaataaacaagttaacaacaacaattgcattcattttatgtttcaggttcagggggaggtgtgggaggttttttaaagcaagtaaaacctctacaaatgtggtagcggccgcggcgctcttccgcttcctcgctcactgactcgctgcgctcggtcgttcggctgcggcgagcggtatcagctcactcaaaggcggtaatacggttatccacagaatcaggggataacgcaggaaagaacatgtgagcaaaaggccagcaaaaggccaggaaccgtaaaaaggccgcgttgctggcgtttttccataggctccgcccccctgacgagcatcacaaaaatcgacgctcaagtcagaggtggcgaaacccgacaggactataaagataccaggcgtttccccctggaagctccctcgtgcgctctcctgttccgaccctgccgcttaccggatacctgtccgcctttctctcttcgggaagcgtggcgctttctcatagctcacgctgtaggtatctcagttcggtgtaggtcgttcgctccaagctgggctgtgtgcacgaaccccccgttcagcccgaccgctgcgccttatccggtaactatcgtcttgagtccaacccggtaagacacgacttatcgccactggcagcagccactggtaacaggattagcagagcgaggtatgtaggcggtgctacagagttcttgaagtggtggcctaactacggctacactagaagaacagtatttggtatctgcgctctgctgaagccagttaccttcggaaaaagagttggtagctcttgatccggcaaacaaaccaccgctggtagcggtggtttttttgtttgcaagcagcagattacgcgcagaaaaaaaggatctcaagaagatcctttgatcttttctacggggtctgacgctcagtggaacgaaaactcacgttaagggattttggtcatgagattatcaaaaaggatcttcacctagatccttttaaattaaaaatgaagttttaaatcaatctaaagtatatatgagtaaacttggtctgacagttaccaatgcttaatcagtgaggcacctatctcagcgatctgtctatttcgttcatccatagttgcctgactccccgtcgtgtagataactacgatacgggagggcttaccatctggccccagtgctgcaatgataccgcgagacccacgctcaccggctccagatttatcagcaataaaccagccagccggaagggccgagcgcagaagtggtcctgcaactttatccgcctccatccagtctattaattgttgccgggaagctagagtaagtagttcgccagttaatagtttgcgcaacgttgttgccattgctacaggcatcgtggtgtcacgctcgtcgtttggtatggcttcattcagctccggttcccaacgatcaaggcgagttacatgatcccccatgttgtgcaaaaaagcggttagctccttcggtcctccgatcgttgtcagaagtaagttggccgcagtgttatcactcatggttatggcagcactgcataattctcttactgtcatgccatccgtaagatgcttttctgtgactggtgagtactcaaccaagtcattctgagaatagtgtatgcggcgaccgagttgctcttgcccggcgtcaatacgggataataccgcgccacatagcagaactttaaaagtgctcatcattggaaaacgttcttcggggcgaaaactctcaaggatcttaccgctgttgagatccagttcgatgtaacccactcgtgcacccaactgatcttcagcatcttttactttcaccagcgtttctgggtgagcaaaaacaggaaggcaaaatgccgcaaaaaagggaataagggcgacacggaaatgttgaatactcatactcttcctttttcaatattattgaagcatttatcagggttattgtctcatgagcggatacatatttgaatgtatttagaaaaataaacaaataggggttccgcgcacatttccccgaaaagtgccacctgacgtctaagaaaccattattatcatgacattaacctataaaaataggcgtatcacgaggccctttcgtcggcgcgccgcggccgc

SEQ ID NO: 680 - DNA, 4624 bp, synthetic construct
  source 1..4624: mol_type = other DNA
caactttgtatagaaaagttggagggcctatttcccatgattccttcatatttgcatatacgatacaaggctgttagagagataattggaattaatttgactgtaaacacaaagatattagtacaaaatacgtgacgtagaaagtaataatttcttgggtagtttgcagttttaaaattatgttttaaaatggactatcatatgcttaccgtaacttgaaagtatttcgatttcttggctttatatatcttgtggaaaggacgaaacaccgtgcacacctcctggcgggcagctctgctgctgcagatgctgctgctgtgttctggcaatacctgcagcagcagcaacagcagcagcagggaggcctgccctgactgcccactttttgtttttcaagtttgtacaaaaaagcaggctgggttgcgccttttccaaggcagccctgggtttgcgcagggacgcggctgctctgggcgtggttccgggaaacgcagcggcgccgaccctgggtctcgcacattcttcacgtccgttcgcagcgtcacccggatcttcgccgctacccttgtgggccccccggcgacgcttcctgctccgcccctaagtcgggaaggttccttgcggttcgcggcgtgccggacgtgacaaacggaagccgcacgtctcactagtaccctcgcagacggacagcgccagggagcaatggcagcgcgccgaccgcgatgggctgtggccaatagcggctgctcagcagggcgcgccgagagcagcggccgggaaggggcggtgcgggaggcggggtgtggggcggtagtgtgggccctgttcctgcccgcgcggtgttccgcattctgcaagcctccggagcgcacgtcggcagtcggctccctcgttgaccgaatcaccgacctctctccccaggacccagctttcttgtacaaagtgggccaccatggtgagcaagggcgaggagctgttcaccggggtggtgcccatcctggtcgagctggacggcgacgtaaacggccacaagttcagcgtgtccggcgagggcgagggcgatgccacctacggcaagctgaccctgaagttcatctgcaccaccggcaagctgcccgtgccctggcccaccctcgtgaccaccctgacctacggcgtgcagtgcttcagccgctaccccgaccacatgaagcagcacgacttcttcaagtccgccatgcccgaaggctacgtccaggagcgcaccatcttcttcaaggacgacggcaactacaagacccgcgccgaggtgaagttcgagggcgacaccctggtgaaccgcatcgagctgaagggcatcgacttcaaggaggacggcaacatcctggggcacaagctggagtacaactacaacagccacaacgtctatatcatggccgacaagcagaagaacggcatcaaggtgaacttcaagatccgccacaacatcgaggacggcagcgtgcagctcgccgaccactaccagcagaacacccccatcggcgacggccccgtgctgctgcccgacaaccactacctgagcacccagtccgccctgagcaaagaccccaacgagaagcgcgatcacatggtcctgctggagttcgtgaccgccgccgggatcactctcggcatggacgagctgtacaagggaagcggagagggcaggggaagtcttctaacatgcggggacgtggaggaaaatcccggccccatgaccgagtacaagcccacggtgcgcctcgccacccgcgacgacgtccccagggccgtacgcaccctcgccgccgcgttcgccgactaccccgccacgcgccacaccgtcgatccggaccgccacatcgagcgggtcaccgagctgcaagaactcttcctcacgcgcgtcgggctcgacatcggcaaggtgtgggtcgcggacgacggcgccgcggtggcggtctggaccacgccggagagcgtcgaagcgggggcggtgttcgccgagatcggcccgcgcatggccgagttgagcggttcccggctggccgcgcagcaacagatggaaggcctcctggcgccgcaccggcccaaggagcccgcgtggttcctggccaccgtcggcgtctcgcccgaccaccagggcaagggtctgggcagcgccgtcgtgctccccggagtggaggcggccgagcgcgccggggtgcccgccttcctggagacctccgcgccccgcaacctccccttctacgagcggctcggcttcaccgtcaccgccgacgtcgaggtgcccgaaggaccgcgcacctggtgcatgacccgcaagcccggtgcctgacaactttattatacatagttgatggccggccgcttcgagcagacatgataagatacattgatgagtttggacaaaccacaactagaatgcagtgaaaaaaatgctttatttgtgaaatttgtgatgctattgctttatttgtaaccattataagctgcaataaacaagttaacaacaacaattgcattcattttatgtttcaggttcagggggaggtgtgggaggttttttaaagcaagtaaaacctctacaaatgtggtagcggccgcggcgctcttccgcttcctcgctcactgactcgctgcgctcggtcgttcggctgcggcgagcggtatcagctcactcaaaggcggtaatacggttatccacagaatcaggggataacgcaggaaagaacatgtgagcaaaaggccagcaaaaggccaggaaccgtaaaaaggccgcgttgctggcgtttttccataggctccgcccccctgacgagcatcacaaaaatcgacgctcaagtcagaggtggcgaaacccgacaggactataaagataccaggcgtttccccctggaagctccctcgtgcgctctcctgttccgaccctgccgcttaccggatacctgtccgcctttctctcttcgggaagcgtggcgctttctcatagctcacgctgtaggtatctcagttcggtgtaggtcgttcgctccaagctgggctgtgtgcacgaaccccccgttcagcccgaccgctgcgccttatccggtaactatcgtcttgagtccaacccggtaagacacgacttatcgccactggcagcagccactggtaacaggattagcagagcgaggtatgtaggcggtgctacagagttcttgaagtggtggcctaactacggctacactagaagaacagtatttggtatctgcgctctgctgaagccagttaccttcggaaaaagagttggtagctcttgatccggcaaacaaaccaccgctggtagcggtggtttttttgtttgcaagcagcagattacgcgcagaaaaaaaggatctcaagaagatcctttgatcttttctacggggtctgacgctcagtggaacgaaaactcacgttaagggattttggtcatgagattatcaaaaaggatcttcacctagatccttttaaattaaaaatgaagttttaaatcaatctaaagtatatatgagtaaacttggtctgacagttaccaatgcttaatcagtgaggcacctatctcagcgatctgtctatttcgttcatccatagttgcctgactccccgtcgtgtagataactacgatacgggagggcttaccatctggccccagtgctgcaatgataccgcgagacccacgctcaccggctccagatttatcagcaataaaccagccagccggaagggccgagcgcagaagtggtcctgcaactttatccgcctccatccagtctattaattgttgccgggaagctagagtaagtagttcgccagttaatagtttgcgcaacgttgttgccattgctacaggcatcgtggtgtcacgctcgtcgtttggtatggcttcattcagctccggttcccaacgatcaaggcgagttacatgatcccccatgttgtgcaaaaaagcggttagctccttcggtcctccgatcgttgtcagaagtaagttggccgcagtgttatcactcatggttatggcagcactgcataattctcttactgtcatgccatccgtaagatgcttttctgtgactggtgagtactcaaccaagtcattctgagaatagtgtatgcggcgaccgagttgctcttgcccggcgtcaatacgggataataccgcgccacatagcagaactttaaaagtgctcatcattggaaaacgttcttcggggcgaaaactctcaaggatcttaccgctgttgagatccagttcgatgtaacccactcgtgcacccaactgatcttcagcatcttttactttcaccagcgtttctgggtgagcaaaaacaggaaggcaaaatgccgcaaaaaagggaataagggcgacacggaaatgttgaatactcatactcttcctttttcaatattattgaagcatttatcagggttattgtctcatgagcggatacatatttgaatgtatttagaaaaataaacaaataggggttccgcgcacatttccccgaaaagtgccacctgacgtctaagaaaccattattatcatgacattaacctataaaaataggcgtatcacgaggccctttcgtcggcgcgccgcggccgc

SEQ ID NO: 681 - DNA, 4624 bp, synthetic construct
  source 1..4624: mol_type = other DNA
caactttgtatagaaaagttggagggcctatttcccatgattccttcatatttgcatatacgatacaaggctgttagagagataattggaattaatttgactgtaaacacaaagatattagtacaaaatacgtgacgtagaaagtaataatttcttgggtagtttgcagttttaaaattatgttttaaaatggactatcatatgcttaccgtaacttgaaagtatttcgatttcttggctttatatatcttgtggaaaggacgaaacaccgtgcacacctcctggcgggcagctctgctgctgcagcagctgctgctgtgttctggcaatacctgcagcagcagcagcagcagcagcagggaggcctgccctgactgcccactttttgtttttcaagtttgtacaaaaaagcaggctgggttgcgccttttccaaggcagccctgggtttgcgcagggacgcggctgctctgggcgtggttccgggaaacgcagcggcgccgaccctgggtctcgcacattcttcacgtccgttcgcagcgtcacccggatcttcgccgctacccttgtgggccccccggcgacgcttcctgctccgcccctaagtcgggaaggttccttgcggttcgcggcgtgccggacgtgacaaacggaagccgcacgtctcactagtaccctcgcagacggacagcgccagggagcaatggcagcgcgccgaccgcgatgggctgtggccaatagcggctgctcagcagggcgcgccgagagcagcggccgggaaggggcggtgcgggaggcggggtgtggggcggtagtgtgggccctgttcctgcccgcgcggtgttccgcattctgcaagcctccggagcgcacgtcggcagtcggctccctcgttgaccgaatcaccgacctctctccccaggacccagctttcttgtacaaagtgggccaccatggtgagcaagggcgaggagctgttcaccggggtggtgcccatcctggtcgagctggacggcgacgtaaacggccacaagttcagcgtgtccggcgagggcgagggcgatgccacctacggcaagctgaccctgaagttcatctgcaccaccggcaagctgcccgtgccctggcccaccctcgtgaccaccctgacctacggcgtgcagtgcttcagccgctaccccgaccacatgaagcagcacgacttcttcaagtccgccatgcccgaaggctacgtccaggagcgcaccatcttcttcaaggacgacggcaactacaagacccgcgccgaggtgaagttcgagggcgacaccctggtgaaccgcatcgagctgaagggcatcgacttcaaggaggacggcaacatcctggggcacaagctggagtacaactacaacagccacaacgtctatatcatggccgacaagcagaagaacggcatcaaggtgaacttcaagatccgccacaacatcgaggacggcagcgtgcagctcgccgaccactaccagcagaacacccccatcggcgacggccccgtgctgctgcccgacaaccactacctgagcacccagtccgccctgagcaaagaccccaacgagaagcgcgatcacatggtcctgctggagttcgtgaccgccgccgggatcactctcggcatggacgagctgtacaagggaagcggagagggcaggggaagtcttctaacatgcggggacgtggaggaaaatcccggccccatgaccgagtacaagcccacggtgcgcctcgccacccgcgacgacgtccccagggccgtacgcaccctcgccgccgcgttcgccgactaccccgccacgcgccacaccgtcgatccggaccgccacatcgagcgggtcaccgagctgcaagaactcttcctcacgcgcgtcgggctcgacatcggcaaggtgtgggtcgcggacgacggcgccgcggtggcggtctggaccacgccggagagcgtcgaagcgggggcggtgttcgccgagatcggcccgcgcatggccgagttgagcggttcccggctggccgcgcagcaacagatggaaggcctcctggcgccgcaccggcccaaggagcccgcgtggttcctggccaccgtcggcgtctcgcccgaccaccagggcaagggtctgggcagcgccgtcgtgctccccggagtggaggcggccgagcgcgccggggtgcccgccttcctggagacctccgcgccccgcaacctccccttctacgagcggctcggcttcaccgtcaccgccgacgtcgaggtgcccgaaggaccgcgcacctggtgcatgacccgcaagcccggtgcctgacaactttattatacatagttgatggccggccgcttcgagcagacatgataagatacattgatgagtttggacaaaccacaactagaatgcagtgaaaaaaatgctttatttgtgaaatttgtgatgctattgctttatttgtaaccattataagctgcaataaacaagttaacaacaacaattgcattcattttatgtttcaggttcagggggaggtgtgggaggttttttaaagcaagtaaaacctctacaaatgtggtagcggccgcggcgctcttccgcttcctcgctcactgactcgctgcgctcggtcgttcggctgcggcgagcggtatcagctcactcaaaggcggtaatacggttatccacagaatcaggggataacgcaggaaagaacatgtgagcaaaaggccagcaaaaggccaggaaccgtaaaaaggccgcgttgctggcgtttttccataggctccgcccccctgacgagcatcacaaaaatcgacgctcaagtcagaggtggcgaaacccgacaggactataaagataccaggcgtttccccctggaagctccctcgtgcgctctcctgttccgaccctgccgcttaccggatacctgtccgcctttctctcttcgggaagcgtggcgctttctcatagctcacgctgtaggtatctcagttcggtgtaggtcgttcgctccaagctgggctgtgtgcacgaaccccccgttcagcccgaccgctgcgccttatccggtaactatcgtcttgagtccaacccggtaagacacgacttatcgccactggcagcagccactggtaacaggattagcagagcgaggtatgtaggcggtgctacagagttcttgaagtggtggcctaactacggctacactagaagaacagtatttggtatctgcgctctgctgaagccagttaccttcggaaaaagagttggtagctcttgatccggcaaacaaaccaccgctggtagcggtggtttttttgtttgcaagcagcagattacgcgcagaaaaaaaggatctcaagaagatcctttgatcttttctacggggtctgacgctcagtggaacgaaaactcacgttaagggattttggtcatgagattatcaaaaaggatcttcacctagatccttttaaattaaaaatgaagttttaaatcaatctaaagtatatatgagtaaacttggtctgacagttaccaatgcttaatcagtgaggcacctatctcagcgatctgtctatttcgttcatccatagttgcctgactccccgtcgtgtagataactacgatacgggagggcttaccatctggccccagtgctgcaatgataccgcgagacccacgctcaccggctccagatttatcagcaataaaccagccagccggaagggccgagcgcagaagtggtcctgcaactttatccgcctccatccagtctattaattgttgccgggaagctagagtaagtagttcgccagttaatagtttgcgcaacgttgttgccattgctacaggcatcgtggtgtcacgctcgtcgtttggtatggcttcattcagctccggttcccaacgatcaaggcgagttacatgatcccccatgttgtgcaaaaaagcggttagctccttcggtcctccgatcgttgtcagaagtaagttggccgcagtgttatcactcatggttatggcagcactgcataattctcttactgtcatgccatccgtaagatgcttttctgtgactggtgagtactcaaccaagtcattctgagaatagtgtatgcggcgaccgagttgctcttgcccggcgtcaatacgggataataccgcgccacatagcagaactttaaaagtgctcatcattggaaaacgttcttcggggcgaaaactctcaaggatcttaccgctgttgagatccagttcgatgtaacccactcgtgcacccaactgatcttcagcatcttttactttcaccagcgtttctgggtgagcaaaaacaggaaggcaaaatgccgcaaaaaagggaataagggcgacacggaaatgttgaatactcatactcttcctttttcaatattattgaagcatttatcagggttattgtctcatgagcggatacatatttgaatgtatttagaaaaataaacaaataggggttccgcgcacatttccccgaaaagtgccacctgacgtctaagaaaccattattatcatgacattaacctataaaaataggcgtatcacgaggccctttcgtcggcgcgccgcggccgc

SEQ ID NO: 682 - DNA, 4624 bp, synthetic construct
  source 1..4624: mol_type = other DNA
caactttgtatagaaaagttggagggcctatttcccatgattccttcatatttgcatatacgatacaaggctgttagagagataattggaattaatttgactgtaaacacaaagatattagtacaaaatacgtgacgtagaaagtaataatttcttgggtagtttgcagttttaaaattatgttttaaaatggactatcatatgcttaccgtaacttgaaagtatttcgatttcttggctttatatatcttgtggaaaggacgaaacaccgtgcacacctcctggcgggcagctctgctgctgcagctactgctgctgtgttctggcaatacctgcagcagcagaagcagcagcagcagggaggcctgccctgactgcccactttttgtttttcaagtttgtacaaaaaagcaggctgggttgcgccttttccaaggcagccctgggtttgcgcagggacgcggctgctctgggcgtggttccgggaaacgcagcggcgccgaccctgggtctcgcacattcttcacgtccgttcgcagcgtcacccggatcttcgccgctacccttgtgggccccccggcgacgcttcctgctccgcccctaagtcgggaaggttccttgcggttcgcggcgtgccggacgtgacaaacggaagccgcacgtctcactagtaccctcgcagacggacagcgccagggagcaatggcagcgcgccgaccgcgatgggctgtggccaatagcggctgctcagcagggcgcgccgagagcagcggccgggaaggggcggtgcgggaggcggggtgtggggcggtagtgtgggccctgttcctgcccgcgcggtgttccgcattctgcaagcctccggagcgcacgtcggcagtcggctccctcgttgaccgaatcaccgacctctctccccaggacccagctttcttgtacaaagtgggccaccatggtgagcaagggcgaggagctgttcaccggggtggtgcccatcctggtcgagctggacggcgacgtaaacggccacaagttcagcgtgtccggcgagggcgagggcgatgccacctacggcaagctgaccctgaagttcatctgcaccaccggcaagctgcccgtgccctggcccaccctcgtgaccaccctgacctacggcgtgcagtgcttcagccgctaccccgaccacatgaagcagcacgacttcttcaagtccgccatgcccgaaggctacgtccaggagcgcaccatcttcttcaaggacgacggcaactacaagacccgcgccgaggtgaagttcgagggcgacaccctggtgaaccgcatcgagctgaagggcatcgacttcaaggaggacggcaacatcctggggcacaagctggagtacaactacaacagccacaacgtctatatcatggccgacaagcagaagaacggcatcaaggtgaacttcaagatccgccacaacatcgaggacggcagcgtgcagctcgccgaccactaccagcagaacacccccatcggcgacggccccgtgctgctgcccgacaaccactacctgagcacccagtccgccctgagcaaagaccccaacgagaagcgcgatcacatggtcctgctggagttcgtgaccgccgccgggatcactctcggcatggacgagctgtacaagggaagcggagagggcaggggaagtcttctaacatgcggggacgtggaggaaaatcccggccccatgaccgagtacaagcccacggtgcgcctcgccacccgcgacgacgtccccagggccgtacgcaccctcgccgccgcgttcgccgactaccccgccacgcgccacaccgtcgatccggaccgccacatcgagcgggtcaccgagctgcaagaactcttcctcacgcgcgtcgggctcgacatcggcaaggtgtgggtcgcggacgacggcgccgcggtggcggtctggaccacgccggagagcgtcgaagcgggggcggtgttcgccgagatcggcccgcgcatggccgagttgagcggttcccggctggccgcgcagcaacagatggaaggcctcctggcgccgcaccggcccaaggagcccgcgtggttcctggccaccgtcggcgtctcgcccgaccaccagggcaagggtctgggcagcgccgtcgtgctccccggagtggaggcggccgagcgcgccggggtgcccgccttcctggagacctccgcgccccgcaacctccccttctacgagcggctcggcttcaccgtcaccgccgacgtcgaggtgcccgaaggaccgcgcacctggtgcatgacccgcaagcccggtgcctgacaactttattatacatagttgatggccggccgcttcgagcagacatgataagatacattgatgagtttggacaaaccacaactagaatgcagtgaaaaaaatgctttatttgtgaaatttgtgatgctattgctttatttgtaaccattataagctgcaataaacaagttaacaacaacaattgcattcattttatgtttcaggttcagggggaggtgtgggaggttttttaaagcaagtaaaacctctacaaatgtggtagcggccgcggcgctcttccgcttcctcgctcactgactcgctgcgctcggtcgttcggctgcggcgagcggtatcagctcactcaaaggcggtaatacggttatccacagaatcaggggataacgcaggaaagaacatgtgagcaaaaggccagcaaaaggccaggaaccgtaaaaaggccgcgttgctggcgtttttccataggctccgcccccctgacgagcatcacaaaaatcgacgctcaagtcagaggtggcgaaacccgacaggactataaagataccaggcgtttccccctggaagctccctcgtgcgctctcctgttccgaccctgccgcttaccggatacctgtccgcctttctctcttcgggaagcgtggcgctttctcatagctcacgctgtaggtatctcagttcggtgtaggtcgttcgctccaagctgggctgtgtgcacgaaccccccgttcagcccgaccgctgcgccttatccggtaactatcgtcttgagtccaacccggtaagacacgacttatcgccactggcagcagccactggtaacaggattagcagagcgaggtatgtaggcggtgctacagagttcttgaagtggtggcctaactacggctacactagaagaacagtatttggtatctgcgctctgctgaagccagttaccttcggaaaaagagttggtagctcttgatccggcaaacaaaccaccgctggtagcggtggtttttttgtttgcaagcagcagattacgcgcagaaaaaaaggatctcaagaagatcctttgatcttttctacggggtctgacgctcagtggaacgaaaactcacgttaagggattttggtcatgagattatcaaaaaggatcttcacctagatccttttaaattaaaaatgaagttttaaatcaatctaaagtatatatgagtaaacttggtctgacagttaccaatgcttaatcagtgaggcacctatctcagcgatctgtctatttcgttcatccatagttgcctgactccccgtcgtgtagataactacgatacgggagggcttaccatctggccccagtgctgcaatgataccgcgagacccacgctcaccggctccagatttatcagcaataaaccagccagccggaagggccgagcgcagaagtggtcctgcaactttatccgcctccatccagtctattaattgttgccgggaagctagagtaagtagttcgccagttaatagtttgcgcaacgttgttgccattgctacaggcatcgtggtgtcacgctcgtcgtttggtatggcttcattcagctccggttcccaacgatcaaggcgagttacatgatcccccatgttgtgcaaaaaagcggttagctccttcggtcctccgatcgttgtcagaagtaagttggccgcagtgttatcactcatggttatggcagcactgcataattctcttactgtcatgccatccgtaagatgcttttctgtgactggtgagtactcaaccaagtcattctgagaatagtgtatgcggcgaccgagttgctcttgcccggcgtcaatacgggataataccgcgccacatagcagaactttaaaagtgctcatcattggaaaacgttcttcggggcgaaaactctcaaggatcttaccgctgttgagatccagttcgatgtaacccactcgtgcacccaactgatcttcagcatcttttactttcaccagcgtttctgggtgagcaaaaacaggaaggcaaaatgccgcaaaaaagggaataagggcgacacggaaatgttgaatactcatactcttcctttttcaatattattgaagcatttatcagggttattgtctcatgagcggatacatatttgaatgtatttagaaaaataaacaaataggggttccgcgcacatttccccgaaaagtgccacctgacgtctaagaaaccattattatcatgacattaacctataaaaataggcgtatcacgaggccctttcgtcggcgcgccgcggccgc

SEQ ID NO: 683 - DNA, 4624 bp, synthetic construct
  source 1..4624: mol_type = other DNA
caactttgtatagaaaagttggagggcctatttcccatgattccttcatatttgcatatacgatacaaggctgttagagagataattggaattaatttgactgtaaacacaaagatattagtacaaaatacgtgacgtagaaagtaataatttcttgggtagtttgcagttttaaaattatgttttaaaatggactatcatatgcttaccgtaacttgaaagtatttcgatttcttggctttatatatcttgtggaaaggacgaaacaccgtgcacacctcctggcgggcagctctgctgctgcagctgatgctgctgtgttctggcaatacctgcagcagcaacagcagcagcagcagggaggcctgccctgactgcccactttttgtttttcaagtttgtacaaaaaagcaggctgggttgcgccttttccaaggcagccctgggtttgcgcagggacgcggctgctctgggcgtggttccgggaaacgcagcggcgccgaccctgggtctcgcacattcttcacgtccgttcgcagcgtcacccggatcttcgccgctacccttgtgggccccccggcgacgcttcctgctccgcccctaagtcgggaaggttccttgcggttcgcggcgtgccggacgtgacaaacggaagccgcacgtctcactagtaccctcgcagacggacagcgccagggagcaatggcagcgcgccgaccgcgatgggctgtggccaatagcggctgctcagcagggcgcgccgagagcagcggccgggaaggggcggtgcgggaggcggggtgtggggcggtagtgtgggccctgttcctgcccgcgcggtgttccgcattctgcaagcctccggagcgcacgtcggcagtcggctccctcgttgaccgaatcaccgacctctctccccaggacccagctttcttgtacaaagtgggccaccatggtgagcaagggcgaggagctgttcaccggggtggtgcccatcctggtcgagctggacggcgacgtaaacggccacaagttcagcgtgtccggcgagggcgagggcgatgccacctacggcaagctgaccctgaagttcatctgcaccaccggcaagctgcccgtgccctggcccaccctcgtgaccaccctgacctacggcgtgcagtgcttcagccgctaccccgaccacatgaagcagcacgacttcttcaagtccgccatgcccgaaggctacgtccaggagcgcaccatcttcttcaaggacgacggcaactacaagacccgcgccgaggtgaagttcgagggcgacaccctggtgaaccgcatcgagctgaagggcatcgacttcaaggaggacggcaacatcctggggcacaagctggagtacaactacaacagccacaacgtctatatcatggccgacaagcagaagaacggcatcaaggtgaacttcaagatccgccacaacatcgaggacggcagcgtgcagctcgccgaccactaccagcagaacacccccatcggcgacggccccgtgctgctgcccgacaaccactacctgagcacccagtccgccctgagcaaagaccccaacgagaagcgcgatcacatggtcctgctggagttcgtgaccgccgccgggatcactctcggcatggacgagctgtacaagggaagcggagagggcaggggaagtcttctaacatgcggggacgtggaggaaaatcccggccccatgaccgagtacaagcccacggtgcgcctcgccacccgcgacgacgtccccagggccgtacgcaccctcgccgccgcgttcgccgactaccccgccacgcgccacaccgtcgatccggaccgccacatcgagcgggtcaccgagctgcaagaactcttcctcacgcgcgtcgggctcgacatcggcaaggtgtgggtcgcggacgacggcgccgcggtggcggtctggaccacgccggagagcgtcgaagcgggggcggtgttcgccgagatcggcccgcgcatggccgagttgagcggttcccggctggccgcgcagcaacagatggaaggcctcctggcgccgcaccggcccaaggagcccgcgtggttcctggccaccgtcggcgtctcgcccgaccaccagggcaagggtctgggcagcgccgtcgtgctccccggagtggaggcggccgagcgcgccggggtgcccgccttcctggagacctccgcgccccgcaacctccccttctacgagcggctcggcttcaccgtcaccgccgacgtcgaggtgcccgaaggaccgcgcacctggtgcatgacccgcaagcccggtgcctgacaactttattatacatagttgatggccggccgcttcgagcagacatgataagatacattgatgagtttggacaaaccacaactagaatgcagtgaaaaaaatgctttatttgtgaaatttgtgatgctattgctttatttgtaaccattataagctgcaataaacaagttaacaacaacaattgcattcattttatgtttcaggttcagggggaggtgtgggaggttttttaaagcaagtaaaacctctacaaatgtggtagcggccgcggcgctcttccgcttcctcgctcactgactcgctgcgctcggtcgttcggctgcggcgagcggtatcagctcactcaaaggcggtaatacggttatccacagaatcaggggataacgcaggaaagaacatgtgagcaaaaggccagcaaaaggccaggaaccgtaaaaaggccgcgttgctggcgtttttccataggctccgcccccctgacgagcatcacaaaaatcgacgctcaagtcagaggtggcgaaacccgacaggactataaagataccaggcgtttccccctggaagctccctcgtgcgctctcctgttccgaccctgccgcttaccggatacctgtccgcctttctctcttcgggaagcgtggcgctttctcatagctcacgctgtaggtatctcagttcggtgtaggtcgttcgctccaagctgggctgtgtgcacgaaccccccgttcagcccgaccgctgcgccttatccggtaactatcgtcttgagtccaacccggtaagacacgacttatcgccactggcagcagccactggtaacaggattagcagagcgaggtatgtaggcggtgctacagagttcttgaagtggtggcctaactacggctacactagaagaacagtatttggtatctgcgctctgctgaagccagttaccttcggaaaaagagttggtagctcttgatccggcaaacaaaccaccgctggtagcggtggtttttttgtttgcaagcagcagattacgcgcagaaaaaaaggatctcaagaagatcctttgatcttttctacggggtctgacgctcagtggaacgaaaactcacgttaagggattttggtcatgagattatcaaaaaggatcttcacctagatccttttaaattaaaaatgaagttttaaatcaatctaaagtatatatgagtaaacttggtctgacagttaccaatgcttaatcagtgaggcacctatctcagcgatctgtctatttcgttcatccatagttgcctgactccccgtcgtgtagataactacgatacgggagggcttaccatctggccccagtgctgcaatgataccgcgagacccacgctcaccggctccagatttatcagcaataaaccagccagccggaagggccgagcgcagaagtggtcctgcaactttatccgcctccatccagtctattaattgttgccgggaagctagagtaagtagttcgccagttaatagtttgcgcaacgttgttgccattgctacaggcatcgtggtgtcacgctcgtcgtttggtatggcttcattcagctccggttcccaacgatcaaggcgagttacatgatcccccatgttgtgcaaaaaagcggttagctccttcggtcctccgatcgttgtcagaagtaagttggccgcagtgttatcactcatggttatggcagcactgcataattctcttactgtcatgccatccgtaagatgcttttctgtgactggtgagtactcaaccaagtcattctgagaatagtgtatgcggcgaccgagttgctcttgcccggcgtcaatacgggataataccgcgccacatagcagaactttaaaagtgctcatcattggaaaacgttcttcggggcgaaaactctcaaggatcttaccgctgttgagatccagttcgatgtaacccactcgtgcacccaactgatcttcagcatcttttactttcaccagcgtttctgggtgagcaaaaacaggaaggcaaaatgccgcaaaaaagggaataagggcgacacggaaatgttgaatactcatactcttcctttttcaatattattgaagcatttatcagggttattgtctcatgagcggatacatatttgaatgtatttagaaaaataaacaaataggggttccgcgcacatttccccgaaaagtgccacctgacgtctaagaaaccattattatcatgacattaacctataaaaataggcgtatcacgaggccctttcgtcggcgcgccgcggccgc

SEQ ID NO: 684 - DNA, 4624 bp, synthetic construct
  source 1..4624: mol_type = other DNA
caactttgtatagaaaagttggagggcctatttcccatgattccttcatatttgcatatacgatacaaggctgttagagagataattggaattaatttgactgtaaacacaaagatattagtacaaaatacgtgacgtagaaagtaataatttcttgggtagtttgcagttttaaaattatgttttaaaatggactatcatatgcttaccgtaacttgaaagtatttcgatttcttggctttatatatcttgtggaaaggacgaaacaccgtgcacacctcctggcgggcagctctgctgctgcagctgcagctgctgtgttctggcaatacctgcagcagcagcagcagcagcagcagggaggcctgccctgactgcccactttttgtttttcaagtttgtacaaaaaagcaggctgggttgcgccttttccaaggcagccctgggtttgcgcagggacgcggctgctctgggcgtggttccgggaaacgcagcggcgccgaccctgggtctcgcacattcttcacgtccgttcgcagcgtcacccggatcttcgccgctacccttgtgggccccccggcgacgcttcctgctccgcccctaagtcgggaaggttccttgcggttcgcggcgtgccggacgtgacaaacggaagccgcacgtctcactagtaccctcgcagacggacagcgccagggagcaatggcagcgcgccgaccgcgatgggctgtggccaatagcggctgctcagcagggcgcgccgagagcagcggccgggaaggggcggtgcgggaggcggggtgtggggcggtagtgtgggccctgttcctgcccgcgcggtgttccgcattctgcaagcctccggagcgcacgtcggcagtcggctccctcgttgaccgaatcaccgacctctctccccaggacccagctttcttgtacaaagtgggccaccatggtgagcaagggcgaggagctgttcaccggggtggtgcccatcctggtcgagctggacggcgacgtaaacggccacaagttcagcgtgtccggcgagggcgagggcgatgccacctacggcaagctgaccctgaagttcatctgcaccaccggcaagctgcccgtgccctggcccaccctcgtgaccaccctgacctacggcgtgcagtgcttcagccgctaccccgaccacatgaagcagcacgacttcttcaagtccgccatgcccgaaggctacgtccaggagcgcaccatcttcttcaaggacgacggcaactacaagacccgcgccgaggtgaagttcgagggcgacaccctggtgaaccgcatcgagctgaagggcatcgacttcaaggaggacggcaacatcctggggcacaagctggagtacaactacaacagccacaacgtctatatcatggccgacaagcagaagaacggcatcaaggtgaacttcaagatccgccacaacatcgaggacggcagcgtgcagctcgccgaccactaccagcagaacacccccatcggcgacggccccgtgctgctgcccgacaaccactacctgagcacccagtccgccctgagcaaagaccccaacgagaagcgcgatcacatggtcctgctggagttcgtgaccgccgccgggatcactctcggcatggacgagctgtacaagggaagcggagagggcaggggaagtcttctaacatgcggggacgtggaggaaaatcccggccccatgaccgagtacaagcccacggtgcgcctcgccacccgcgacgacgtccccagggccgtacgcaccctcgccgccgcgttcgccgactaccccgccacgcgccacaccgtcgatccggaccgccacatcgagcgggtcaccgagctgcaagaactcttcctcacgcgcgtcgggctcgacatcggcaaggtgtgggtcgcggacgacggcgccgcggtggcggtctggaccacgccggagagcgtcgaagcgggggcggtgttcgccgagatcggcccgcgcatggccgagttgagcggttcccggctggccgcgcagcaacagatggaaggcctcctggcgccgcaccggcccaaggagcccgcgtggttcctggccaccgtcggcgtctcgcccgaccaccagggcaagggtctgggcagcgccgtcgtgctccccggagtggaggcggccgagcgcgccggggtgcccgccttcctggagacctccgcgccccgcaacctccccttctacgagcggctcggcttcaccgtcaccgccgacgtcgaggtgcccgaaggaccgcgcacctggtgcatgacccgcaagcccggtgcctgacaactttattatacatagttgatggccggccgcttcgagcagacatgataagatacattgatgagtttggacaaaccacaactagaatgcagtgaaaaaaatgctttatttgtgaaatttgtgatgctattgctttatttgtaaccattataagctgcaataaacaagttaacaacaacaattgcattcattttatgtttcaggttcagggggaggtgtgggaggttttttaaagcaagtaaaacctctacaaatgtggtagcggccgcggcgctcttccgcttcctcgctcactgactcgctgcgctcggtcgttcggctgcggcgagcggtatcagctcactcaaaggcggtaatacggttatccacagaatcaggggataacgcaggaaagaacatgtgagcaaaaggccagcaaaaggccaggaaccgtaaaaaggccgcgttgctggcgtttttccataggctccgcccccctgacgagcatcacaaaaatcgacgctcaagtcagaggtggcgaaacccgacaggactataaagataccaggcgtttccccctggaagctccctcgtgcgctctcctgttccgaccctgccgcttaccggatacctgtccgcctttctctcttcgggaagcgtggcgctttctcatagctcacgctgtaggtatctcagttcggtgtaggtcgttcgctccaagctgggctgtgtgcacgaaccccccgttcagcccgaccgctgcgccttatccggtaactatcgtcttgagtccaacccggtaagacacgacttatcgccactggcagcagccactggtaacaggattagcagagcgaggtatgtaggcggtgctacagagttcttgaagtggtggcctaactacggctacactagaagaacagtatttggtatctgcgctctgctgaagccagttaccttcggaaaaagagttggtagctcttgatccggcaaacaaaccaccgctggtagcggtggtttttttgtttgcaagcagcagattacgcgcagaaaaaaaggatctcaagaagatcctttgatcttttctacggggtctgacgctcagtggaacgaaaactcacgttaagggattttggtcatgagattatcaaaaaggatcttcacctagatccttttaaattaaaaatgaagttttaaatcaatctaaagtatatatgagtaaacttggtctgacagttaccaatgcttaatcagtgaggcacctatctcagcgatctgtctatttcgttcatccatagttgcctgactccccgtcgtgtagataactacgatacgggagggcttaccatctggccccagtgctgcaatgataccgcgagacccacgctcaccggctccagatttatcagcaataaaccagccagccggaagggccgagcgcagaagtggtcctgcaactttatccgcctccatccagtctattaattgttgccgggaagctagagtaagtagttcgccagttaatagtttgcgcaacgttgttgccattgctacaggcatcgtggtgtcacgctcgtcgtttggtatggcttcattcagctccggttcccaacgatcaaggcgagttacatgatcccccatgttgtgcaaaaaagcggttagctccttcggtcctccgatcgttgtcagaagtaagttggccgcagtgttatcactcatggttatggcagcactgcataattctcttactgtcatgccatccgtaagatgcttttctgtgactggtgagtactcaaccaagtcattctgagaatagtgtatgcggcgaccgagttgctcttgcccggcgtcaatacgggataataccgcgccacatagcagaactttaaaagtgctcatcattggaaaacgttcttcggggcgaaaactctcaaggatcttaccgctgttgagatccagttcgatgtaacccactcgtgcacccaactgatcttcagcatcttttactttcaccagcgtttctgggtgagcaaaaacaggaaggcaaaatgccgcaaaaaagggaataagggcgacacggaaatgttgaatactcatactcttcctttttcaatattattgaagcatttatcagggttattgtctcatgagcggatacatatttgaatgtatttagaaaaataaacaaataggggttccgcgcacatttccccgaaaagtgccacctgacgtctaagaaaccattattatcatgacattaacctataaaaataggcgtatcacgaggccctttcgtcggcgcgccgcggccgc

SEQ ID NO: 685 - DNA, 4624 bp, synthetic construct
  source 1..4624: mol_type = other DNA
caactttgtatagaaaagttggagggcctatttcccatgattccttcatatttgcatatacgatacaaggctgttagagagataattggaattaatttgactgtaaacacaaagatattagtacaaaatacgtgacgtagaaagtaataatttcttgggtagtttgcagttttaaaattatgttttaaaatggactatcatatgcttaccgtaacttgaaagtatttcgatttcttggctttatatatcttgtggaaaggacgaaacaccgtgcacacctcctggcgggcagctctgctgctgcagctgctactgctgtgttctggcaatacctgcagcagaagcagcagcagcagcagggaggcctgccctgactgcccactttttgtttttcaagtttgtacaaaaaagcaggctgggttgcgccttttccaaggcagccctgggtttgcgcagggacgcggctgctctgggcgtggttccgggaaacgcagcggcgccgaccctgggtctcgcacattcttcacgtccgttcgcagcgtcacccggatcttcgccgctacccttgtgggccccccggcgacgcttcctgctccgcccctaagtcgggaaggttccttgcggttcgcggcgtgccggacgtgacaaacggaagccgcacgtctcactagtaccctcgcagacggacagcgccagggagcaatggcagcgcgccgaccgcgatgggctgtggccaatagcggctgctcagcagggcgcgccgagagcagcggccgggaaggggcggtgcgggaggcggggtgtggggcggtagtgtgggccctgttcctgcccgcgcggtgttccgcattctgcaagcctccggagcgcacgtcggcagtcggctccctcgttgaccgaatcaccgacctctctccccaggacccagctttcttgtacaaagtgggccaccatggtgagcaagggcgaggagctgttcaccggggtggtgcccatcctggtcgagctggacggcgacgtaaacggccacaagttcagcgtgtccggcgagggcgagggcgatgccacctacggcaagctgaccctgaagttcatctgcaccaccggcaagctgcccgtgccctggcccaccctcgtgaccaccctgacctacggcgtgcagtgcttcagccgctaccccgaccacatgaagcagcacgacttcttcaagtccgccatgcccgaaggctacgtccaggagcgcaccatcttcttcaaggacgacggcaactacaagacccgcgccgaggtgaagttcgagggcgacaccctggtgaaccgcatcgagctgaagggcatcgacttcaaggaggacggcaacatcctggggcacaagctggagtacaactacaacagccacaacgtctatatcatggccgacaagcagaagaacggcatcaaggtgaacttcaagatccgccacaacatcgaggacggcagcgtgcagctcgccgaccactaccagcagaacacccccatcggcgacggccccgtgctgctgcccgacaaccactacctgagcacccagtccgccctgagcaaagaccccaacgagaagcgcgatcacatggtcctgctggagttcgtgaccgccgccgggatcactctcggcatggacgagctgtacaagggaagcggagagggcaggggaagtcttctaacatgcggggacgtggaggaaaatcccggccccatgaccgagtacaagcccacggtgcgcctcgccacccgcgacgacgtccccagggccgtacgcaccctcgccgccgcgttcgccgactaccccgccacgcgccacaccgtcgatccggaccgccacatcgagcgggtcaccgagctgcaagaactcttcctcacgcgcgtcgggctcgacatcggcaaggtgtgggtcgcggacgacggcgccgcggtggcggtctggaccacgccggagagcgtcgaagcgggggcggtgttcgccgagatcggcccgcgcatggccgagttgagcggttcccggctggccgcgcagcaacagatggaaggcctcctggcgccgcaccggcccaaggagcccgcgtggttcctggccaccgtcggcgtctcgcccgaccaccagggcaagggtctgggcagcgccgtcgtgctccccggagtggaggcggccgagcgcgccggggtgcccgccttcctggagacctccgcgccccgcaacctccccttctacgagcggctcggcttcaccgtcaccgccgacgtcgaggtgcccgaaggaccgcgcacctggtgcatgacccgcaagcccggtgcctgacaactttattatacatagttgatggccggccgcttcgagcagacatgataagatacattgatgagtttggacaaaccacaactagaatgcagtgaaaaaaatgctttatttgtgaaatttgtgatgctattgctttatttgtaaccattataagctgcaataaacaagttaacaacaacaattgcattcattttatgtttcaggttcagggggaggtgtgggaggttttttaaagcaagtaaaacctctacaaatgtggtagcggccgcggcgctcttccgcttcctcgctcactgactcgctgcgctcggtcgttcggctgcggcgagcggtatcagctcactcaaaggcggtaatacggttatccacagaatcaggggataacgcaggaaagaacatgtgagcaaaaggccagcaaaaggccaggaaccgtaaaaaggccgcgttgctggcgtttttccataggctccgcccccctgacgagcatcacaaaaatcgacgctcaagtcagaggtggcgaaacccgacaggactataaagataccaggcgtttccccctggaagctccctcgtgcgctctcctgttccgaccctgccgcttaccggatacctgtccgcctttctctcttcgggaagcgtggcgctttctcatagctcacgctgtaggtatctcagttcggtgtaggtcgttcgctccaagctgggctgtgtgcacgaaccccccgttcagcccgaccgctgcgccttatccggtaactatcgtcttgagtccaacccggtaagacacgacttatcgccactggcagcagccactggtaacaggattagcagagcgaggtatgtaggcggtgctacagagttcttgaagtggtggcctaactacggctacactagaagaacagtatttggtatctgcgctctgctgaagccagttaccttcggaaaaagagttggtagctcttgatccggcaaacaaaccaccgctggtagcggtggtttttttgtttgcaagcagcagattacgcgcagaaaaaaaggatctcaagaagatcctttgatcttttctacggggtctgacgctcagtggaacgaaaactcacgttaagggattttggtcatgagattatcaaaaaggatcttcacctagatccttttaaattaaaaatgaagttttaaatcaatctaaagtatatatgagtaaacttggtctgacagttaccaatgcttaatcagtgaggcacctatctcagcgatctgtctatttcgttcatccatagttgcctgactccccgtcgtgtagataactacgatacgggagggcttaccatctggccccagtgctgcaatgataccgcgagacccacgctcaccggctccagatttatcagcaataaaccagccagccggaagggccgagcgcagaagtggtcctgcaactttatccgcctccatccagtctattaattgttgccgggaagctagagtaagtagttcgccagttaatagtttgcgcaacgttgttgccattgctacaggcatcgtggtgtcacgctcgtcgtttggtatggcttcattcagctccggttcccaacgatcaaggcgagttacatgatcccccatgttgtgcaaaaaagcggttagctccttcggtcctccgatcgttgtcagaagtaagttggccgcagtgttatcactcatggttatggcagcactgcataattctcttactgtcatgccatccgtaagatgcttttctgtgactggtgagtactcaaccaagtcattctgagaatagtgtatgcggcgaccgagttgctcttgcccggcgtcaatacgggataataccgcgccacatagcagaactttaaaagtgctcatcattggaaaacgttcttcggggcgaaaactctcaaggatcttaccgctgttgagatccagttcgatgtaacccactcgtgcacccaactgatcttcagcatcttttactttcaccagcgtttctgggtgagcaaaaacaggaaggcaaaatgccgcaaaaaagggaataagggcgacacggaaatgttgaatactcatactcttcctttttcaatattattgaagcatttatcagggttattgtctcatgagcggatacatatttgaatgtatttagaaaaataaacaaataggggttccgcgcacatttccccgaaaagtgccacctgacgtctaagaaaccattattatcatgacattaacctataaaaataggcgtatcacgaggccctttcgtcggcgcgccgcggccgc

SEQ ID NO: 686 - DNA, 4624 bp, synthetic construct
  source 1..4624: mol_type = other DNA
caactttgtatagaaaagttggagggcctatttcccatgattccttcatatttgcatatacgatacaaggctgttagagagataattggaattaatttgactgtaaacacaaagatattagtacaaaatacgtgacgtagaaagtaataatttcttgggtagtttgcagttttaaaattatgttttaaaatggactatcatatgcttaccgtaacttgaaagtatttcgatttcttggctttatatatcttgtggaaaggacgaaacaccgtgcacacctcctggcgggcagctctgctgctgcagctgctgatgctgtgttctggcaatacctgcagcaacagcagcagcagcagcagggaggcctgccctgactgcccactttttgtttttcaagtttgtacaaaaaagcaggctgggttgcgccttttccaaggcagccctgggtttgcgcagggacgcggctgctctgggcgtggttccgggaaacgcagcggcgccgaccctgggtctcgcacattcttcacgtccgttcgcagcgtcacccggatcttcgccgctacccttgtgggccccccggcgacgcttcctgctccgcccctaagtcgggaaggttccttgcggttcgcggcgtgccggacgtgacaaacggaagccgcacgtctcactagtaccctcgcagacggacagcgccagggagcaatggcagcgcgccgaccgcgatgggctgtggccaatagcggctgctcagcagggcgcgccgagagcagcggccgggaaggggcggtgcgggaggcggggtgtggggcggtagtgtgggccctgttcctgcccgcgcggtgttccgcattctgcaagcctccggagcgcacgtcggcagtcggctccctcgttgaccgaatcaccgacctctctccccaggacccagctttcttgtacaaagtgggccaccatggtgagcaagggcgaggagctgttcaccggggtggtgcccatcctggtcgagctggacggcgacgtaaacggccacaagttcagcgtgtccggcgagggcgagggcgatgccacctacggcaagctgaccctgaagttcatctgcaccaccggcaagctgcccgtgccctggcccaccctcgtgaccaccctgacctacggcgtgcagtgcttcagccgctaccccgaccacatgaagcagcacgacttcttcaagtccgccatgcccgaaggctacgtccaggagcgcaccatcttcttcaaggacgacggcaactacaagacccgcgccgaggtgaagttcgagggcgacaccctggtgaaccgcatcgagctgaagggcatcgacttcaaggaggacggcaacatcctggggcacaagctggagtacaactacaacagccacaacgtctatatcatggccgacaagcagaagaacggcatcaaggtgaacttcaagatccgccacaacatcgaggacggcagcgtgcagctcgccgaccactaccagcagaacacccccatcggcgacggccccgtgctgctgcccgacaaccactacctgagcacccagtccgccctgagcaaagaccccaacgagaagcgcgatcacatggtcctgctggagttcgtgaccgccgccgggatcactctcggcatggacgagctgtacaagggaagcggagagggcaggggaagtcttctaacatgcggggacgtggaggaaaatcccggccccatgaccgagtacaagcccacggtgcgcctcgccacccgcgacgacgtccccagggccgtacgcaccctcgccgccgcgttcgccgactaccccgccacgcgccacaccgtcgatccggaccgccacatcgagcgggtcaccgagctgcaagaactcttcctcacgcgcgtcgggctcgacatcggcaaggtgtgggtcgcggacgacggcgccgcggtggcggtctggaccacgccggagagcgtcgaagcgggggcggtgttcgccgagatcggcccgcgcatggccgagttgagcggttcccggctggccgcgcagcaacagatggaaggcctcctggcgccgcaccggcccaaggagcccgcgtggttcctggccaccgtcggcgtctcgcccgaccaccagggcaagggtctgggcagcgccgtcgtgctccccggagtggaggcggccgagcgcgccggggtgcccgccttcctggagacctccgcgccccgcaacctccccttctacgagcggctcggcttcaccgtcaccgccgacgtcgaggtgcccgaaggaccgcgcacctggtgcatgacccgcaagcccggtgcctgacaactttattatacatagttgatggccggccgcttcgagcagacatgataagatacattgatgagtttggacaaaccacaactagaatgcagtgaaaaaaatgctttatttgtgaaatttgtgatgctattgctttatttgtaaccattataagctgcaataaacaagttaacaacaacaattgcattcattttatgtttcaggttcagggggaggtgtgggaggttttttaaagcaagtaaaacctctacaaatgtggtagcggccgcggcgctcttccgcttcctcgctcactgactcgctgcgctcggtcgttcggctgcggcgagcggtatcagctcactcaaaggcggtaatacggttatccacagaatcaggggataacgcaggaaagaacatgtgagcaaaaggccagcaaaaggccaggaaccgtaaaaaggccgcgttgctggcgtttttccataggctccgcccccctgacgagcatcacaaaaatcgacgctcaagtcagaggtggcgaaacccgacaggactataaagataccaggcgtttccccctggaagctccctcgtgcgctctcctgttccgaccctgccgcttaccggatacctgtccgcctttctctcttcgggaagcgtggcgctttctcatagctcacgctgtaggtatctcagttcggtgtaggtcgttcgctccaagctgggctgtgtgcacgaaccccccgttcagcccgaccgctgcgccttatccggtaactatcgtcttgagtccaacccggtaagacacgacttatcgccactggcagcagccactggtaacaggattagcagagcgaggtatgtaggcggtgctacagagttcttgaagtggtggcctaactacggctacactagaagaacagtatttggtatctgcgctctgctgaagccagttaccttcggaaaaagagttggtagctcttgatccggcaaacaaaccaccgctggtagcggtggtttttttgtttgcaagcagcagattacgcgcagaaaaaaaggatctcaagaagatcctttgatcttttctacggggtctgacgctcagtggaacgaaaactcacgttaagggattttggtcatgagattatcaaaaaggatcttcacctagatccttttaaattaaaaatgaagttttaaatcaatctaaagtatatatgagtaaacttggtctgacagttaccaatgcttaatcagtgaggcacctatctcagcgatctgtctatttcgttcatccatagttgcctgactccccgtcgtgtagataactacgatacgggagggcttaccatctggccccagtgctgcaatgataccgcgagacccacgctcaccggctccagatttatcagcaataaaccagccagccggaagggccgagcgcagaagtggtcctgcaactttatccgcctccatccagtctattaattgttgccgggaagctagagtaagtagttcgccagttaatagtttgcgcaacgttgttgccattgctacaggcatcgtggtgtcacgctcgtcgtttggtatggcttcattcagctccggttcccaacgatcaaggcgagttacatgatcccccatgttgtgcaaaaaagcggttagctccttcggtcctccgatcgttgtcagaagtaagttggccgcagtgttatcactcatggttatggcagcactgcataattctcttactgtcatgccatccgtaagatgcttttctgtgactggtgagtactcaaccaagtcattctgagaatagtgtatgcggcgaccgagttgctcttgcccggcgtcaatacgggataataccgcgccacatagcagaactttaaaagtgctcatcattggaaaacgttcttcggggcgaaaactctcaaggatcttaccgctgttgagatccagttcgatgtaacccactcgtgcacccaactgatcttcagcatcttttactttcaccagcgtttctgggtgagcaaaaacaggaaggcaaaatgccgcaaaaaagggaataagggcgacacggaaatgttgaatactcatactcttcctttttcaatattattgaagcatttatcagggttattgtctcatgagcggatacatatttgaatgtatttagaaaaataaacaaataggggttccgcgcacatttccccgaaaagtgccacctgacgtctaagaaaccattattatcatgacattaacctataaaaataggcgtatcacgaggccctttcgtcggcgcgccgcggccgc

SEQ ID NO: 687 - DNA, 4624 bp, synthetic construct
  source 1..4624: mol_type = other DNA
caactttgtatagaaaagttggagggcctatttcccatgattccttcatatttgcatatacgatacaaggctgttagagagataattggaattaatttgactgtaaacacaaagatattagtacaaaatacgtgacgtagaaagtaataatttcttgggtagtttgcagttttaaaattatgttttaaaatggactatcatatgcttaccgtaacttgaaagtatttcgatttcttggctttatatatcttgtggaaaggacgaaacaccgtgcacacctcctggcgggcagctctgctgctgctaaagctgctgctgtgttctggcaatacctgcagcagcagcaaaagcagcagcagggaggcctgccctgactgcccactttttgtttttcaagtttgtacaaaaaagcaggctgggttgcgccttttccaaggcagccctgggtttgcgcagggacgcggctgctctgggcgtggttccgggaaacgcagcggcgccgaccctgggtctcgcacattcttcacgtccgttcgcagcgtcacccggatcttcgccgctacccttgtgggccccccggcgacgcttcctgctccgcccctaagtcgggaaggttccttgcggttcgcggcgtgccggacgtgacaaacggaagccgcacgtctcactagtaccctcgcagacggacagcgccagggagcaatggcagcgcgccgaccgcgatgggctgtggccaatagcggctgctcagcagggcgcgccgagagcagcggccgggaaggggcggtgcgggaggcggggtgtggggcggtagtgtgggccctgttcctgcccgcgcggtgttccgcattctgcaagcctccggagcgcacgtcggcagtcggctccctcgttgaccgaatcaccgacctctctccccaggacccagctttcttgtacaaagtgggccaccatggtgagcaagggcgaggagctgttcaccggggtggtgcccatcctggtcgagctggacggcgacgtaaacggccacaagttcagcgtgtccggcgagggcgagggcgatgccacctacggcaagctgaccctgaagttcatctgcaccaccggcaagctgcccgtgccctggcccaccctcgtgaccaccctgacctacggcgtgcagtgcttcagccgctaccccgaccacatgaagcagcacgacttcttcaagtccgccatgcccgaaggctacgtccaggagcgcaccatcttcttcaaggacgacggcaactacaagacccgcgccgaggtgaagttcgagggcgacaccctggtgaaccgcatcgagctgaagggcatcgacttcaaggaggacggcaacatcctggggcacaagctggagtacaactacaacagccacaacgtctatatcatggccgacaagcagaagaacggcatcaaggtgaacttcaagatccgccacaacatcgaggacggcagcgtgcagctcgccgaccactaccagcagaacacccccatcggcgacggccccgtgctgctgcccgacaaccactacctgagcacccagtccgccctgagcaaagaccccaacgagaagcgcgatcacatggtcctgctggagttcgtgaccgccgccgggatcactctcggcatggacgagctgtacaagggaagcggagagggcaggggaagtcttctaacatgcggggacgtggaggaaaatcccggccccatgaccgagtacaagcccacggtgcgcctcgccacccgcgacgacgtccccagggccgtacgcaccctcgccgccgcgttcgccgactaccccgccacgcgccacaccgtcgatccggaccgccacatcgagcgggtcaccgagctgcaagaactcttcctcacgcgcgtcgggctcgacatcggcaaggtgtgggtcgcggacgacggcgccgcggtggcggtctggaccacgccggagagcgtcgaagcgggggcggtgttcgccgagatcggcccgcgcatggccgagttgagcggttcccggctggccgcgcagcaacagatggaaggcctcctggcgccgcaccggcccaaggagcccgcgtggttcctggccaccgtcggcgtctcgcccgaccaccagggcaagggtctgggcagcgccgtcgtgctccccggagtggaggcggccgagcgcgccggggtgcccgccttcctggagacctccgcgccccgcaacctccccttctacgagcggctcggcttcaccgtcaccgccgacgtcgaggtgcccgaaggaccgcgcacctggtgcatgacccgcaagcccggtgcctgacaactttattatacatagttgatggccggccgcttcgagcagacatgataagatacattgatgagtttggacaaaccacaactagaatgcagtgaaaaaaatgctttatttgtgaaatttgtgatgctattgctttatttgtaaccattataagctgcaataaacaagttaacaacaacaattgcattcattttatgtttcaggttcagggggaggtgtgggaggttttttaaagcaagtaaaacctctacaaatgtggtagcggccgcggcgctcttccgcttcctcgctcactgactcgctgcgctcggtcgttcggctgcggcgagcggtatcagctcactcaaaggcggtaatacggttatccacagaatcaggggataacgcaggaaagaacatgtgagcaaaaggccagcaaaaggccaggaaccgtaaaaaggccgcgttgctggcgtttttccataggctccgcccccctgacgagcatcacaaaaatcgacgctcaagtcagaggtggcgaaacccgacaggactataaagataccaggcgtttccccctggaagctccctcgtgcgctctcctgttccgaccctgccgcttaccggatacctgtccgcctttctctcttcgggaagcgtggcgctttctcatagctcacgctgtaggtatctcagttcggtgtaggtcgttcgctccaagctgggctgtgtgcacgaaccccccgttcagcccgaccgctgcgccttatccggtaactatcgtcttgagtccaacccggtaagacacgacttatcgccactggcagcagccactggtaacaggattagcagagcgaggtatgtaggcggtgctacagagttcttgaagtggtggcctaactacggctacactagaagaacagtatttggtatctgcgctctgctgaagccagttaccttcggaaaaagagttggtagctcttgatccggcaaacaaaccaccgctggtagcggtggtttttttgtttgcaagcagcagattacgcgcagaaaaaaaggatctcaagaagatcctttgatcttttctacggggtctgacgctcagtggaacgaaaactcacgttaagggattttggtcatgagattatcaaaaaggatcttcacctagatccttttaaattaaaaatgaagttttaaatcaatctaaagtatatatgagtaaacttggtctgacagttaccaatgcttaatcagtgaggcacctatctcagcgatctgtctatttcgttcatccatagttgcctgactccccgtcgtgtagataactacgatacgggagggcttaccatctggccccagtgctgcaatgataccgcgagacccacgctcaccggctccagatttatcagcaataaaccagccagccggaagggccgagcgcagaagtggtcctgcaactttatccgcctccatccagtctattaattgttgccgggaagctagagtaagtagttcgccagttaatagtttgcgcaacgttgttgccattgctacaggcatcgtggtgtcacgctcgtcgtttggtatggcttcattcagctccggttcccaacgatcaaggcgagttacatgatcccccatgttgtgcaaaaaagcggttagctccttcggtcctccgatcgttgtcagaagtaagttggccgcagtgttatcactcatggttatggcagcactgcataattctcttactgtcatgccatccgtaagatgcttttctgtgactggtgagtactcaaccaagtcattctgagaatagtgtatgcggcgaccgagttgctcttgcccggcgtcaatacgggataataccgcgccacatagcagaactttaaaagtgctcatcattggaaaacgttcttcggggcgaaaactctcaaggatcttaccgctgttgagatccagttcgatgtaacccactcgtgcacccaactgatcttcagcatcttttactttcaccagcgtttctgggtgagcaaaaacaggaaggcaaaatgccgcaaaaaagggaataagggcgacacggaaatgttgaatactcatactcttcctttttcaatattattgaagcatttatcagggttattgtctcatgagcggatacatatttgaatgtatttagaaaaataaacaaataggggttccgcgcacatttccccgaaaagtgccacctgacgtctaagaaaccattattatcatgacattaacctataaaaataggcgtatcacgaggccctttcgtcggcgcgccgcggccgc

SEQ ID NO: 688 - DNA, 4624 bp, synthetic construct
  source 1..4624: mol_type = other DNA
caactttgtatagaaaagttggagggcctatttcccatgattccttcatatttgcatatacgatacaaggctgttagagagataattggaattaatttgactgtaaacacaaagatattagtacaaaatacgtgacgtagaaagtaataatttcttgggtagtttgcagttttaaaattatgttttaaaatggactatcatatgcttaccgtaacttgaaagtatttcgatttcttggctttatatatcttgtggaaaggacgaaacaccgtgcacacctcctggcgggcagctctgctgctgctaatactgctgctgtgttctggcaatacctgcagcagcagaaaaagcagcagcagggaggcctgccctgactgcccactttttgtttttcaagtttgtacaaaaaagcaggctgggttgcgccttttccaaggcagccctgggtttgcgcagggacgcggctgctctgggcgtggttccgggaaacgcagcggcgccgaccctgggtctcgcacattcttcacgtccgttcgcagcgtcacccggatcttcgccgctacccttgtgggccccccggcgacgcttcctgctccgcccctaagtcgggaaggttccttgcggttcgcggcgtgccggacgtgacaaacggaagccgcacgtctcactagtaccctcgcagacggacagcgccagggagcaatggcagcgcgccgaccgcgatgggctgtggccaatagcggctgctcagcagggcgcgccgagagcagcggccgggaaggggcggtgcgggaggcggggtgtggggcggtagtgtgggccctgttcctgcccgcgcggtgttccgcattctgcaagcctccggagcgcacgtcggcagtcggctccctcgttgaccgaatcaccgacctctctccccaggacccagctttcttgtacaaagtgggccaccatggtgagcaagggcgaggagctgttcaccggggtggtgcccatcctggtcgagctggacggcgacgtaaacggccacaagttcagcgtgtccggcgagggcgagggcgatgccacctacggcaagctgaccctgaagttcatctgcaccaccggcaagctgcccgtgccctggcccaccctcgtgaccaccctgacctacggcgtgcagtgcttcagccgctaccccgaccacatgaagcagcacgacttcttcaagtccgccatgcccgaaggctacgtccaggagcgcaccatcttcttcaaggacgacggcaactacaagacccgcgccgaggtgaagttcgagggcgacaccctggtgaaccgcatcgagctgaagggcatcgacttcaaggaggacggcaacatcctggggcacaagctggagtacaactacaacagccacaacgtctatatcatggccgacaagcagaagaacggcatcaaggtgaacttcaagatccgccacaacatcgaggacggcagcgtgcagctcgccgaccactaccagcagaacacccccatcggcgacggccccgtgctgctgcccgacaaccactacctgagcacccagtccgccctgagcaaagaccccaacgagaagcgcgatcacatggtcctgctggagttcgtgaccgccgccgggatcactctcggcatggacgagctgtacaagggaagcggagagggcaggggaagtcttctaacatgcggggacgtggaggaaaatcccggccccatgaccgagtacaagcccacggtgcgcctcgccacccgcgacgacgtccccagggccgtacgcaccctcgccgccgcgttcgccgactaccccgccacgcgccacaccgtcgatccggaccgccacatcgagcgggtcaccgagctgcaagaactcttcctcacgcgcgtcgggctcgacatcggcaaggtgtgggtcgcggacgacggcgccgcggtggcggtctggaccacgccggagagcgtcgaagcgggggcggtgttcgccgagatcggcccgcgcatggccgagttgagcggttcccggctggccgcgcagcaacagatggaaggcctcctggcgccgcaccggcccaaggagcccgcgtggttcctggccaccgtcggcgtctcgcccgaccaccagggcaagggtctgggcagcgccgtcgtgctccccggagtggaggcggccgagcgcgccggggtgcccgccttcctggagacctccgcgccccgcaacctccccttctacgagcggctcggcttcaccgtcaccgccgacgtcgaggtgcccgaaggaccgcgcacctggtgcatgacccgcaagcccggtgcctgacaactttattatacatagttgatggccggccgcttcgagcagacatgataagatacattgatgagtttggacaaaccacaactagaatgcagtgaaaaaaatgctttatttgtgaaatttgtgatgctattgctttatttgtaaccattataagctgcaataaacaagttaacaacaacaattgcattcattttatgtttcaggttcagggggaggtgtgggaggttttttaaagcaagtaaaacctctacaaatgtggtagcggccgcggcgctcttccgcttcctcgctcactgactcgctgcgctcggtcgttcggctgcggcgagcggtatcagctcactcaaaggcggtaatacggttatccacagaatcaggggataacgcaggaaagaacatgtgagcaaaaggccagcaaaaggccaggaaccgtaaaaaggccgcgttgctggcgtttttccataggctccgcccccctgacgagcatcacaaaaatcgacgctcaagtcagaggtggcgaaacccgacaggactataaagataccaggcgtttccccctggaagctccctcgtgcgctctcctgttccgaccctgccgcttaccggatacctgtccgcctttctctcttcgggaagcgtggcgctttctcatagctcacgctgtaggtatctcagttcggtgtaggtcgttcgctccaagctgggctgtgtgcacgaaccccccgttcagcccgaccgctgcgccttatccggtaactatcgtcttgagtccaacccggtaagacacgacttatcgccactggcagcagccactggtaacaggattagcagagcgaggtatgtaggcggtgctacagagttcttgaagtggtggcctaactacggctacactagaagaacagtatttggtatctgcgctctgctgaagccagttaccttcggaaaaagagttggtagctcttgatccggcaaacaaaccaccgctggtagcggtggtttttttgtttgcaagcagcagattacgcgcagaaaaaaaggatctcaagaagatcctttgatcttttctacggggtctgacgctcagtggaacgaaaactcacgttaagggattttggtcatgagattatcaaaaaggatcttcacctagatccttttaaattaaaaatgaagttttaaatcaatctaaagtatatatgagtaaacttggtctgacagttaccaatgcttaatcagtgaggcacctatctcagcgatctgtctatttcgttcatccatagttgcctgactccccgtcgtgtagataactacgatacgggagggcttaccatctggccccagtgctgcaatgataccgcgagacccacgctcaccggctccagatttatcagcaataaaccagccagccggaagggccgagcgcagaagtggtcctgcaactttatccgcctccatccagtctattaattgttgccgggaagctagagtaagtagttcgccagttaatagtttgcgcaacgttgttgccattgctacaggcatcgtggtgtcacgctcgtcgtttggtatggcttcattcagctccggttcccaacgatcaaggcgagttacatgatcccccatgttgtgcaaaaaagcggttagctccttcggtcctccgatcgttgtcagaagtaagttggccgcagtgttatcactcatggttatggcagcactgcataattctcttactgtcatgccatccgtaagatgcttttctgtgactggtgagtactcaaccaagtcattctgagaatagtgtatgcggcgaccgagttgctcttgcccggcgtcaatacgggataataccgcgccacatagcagaactttaaaagtgctcatcattggaaaacgttcttcggggcgaaaactctcaaggatcttaccgctgttgagatccagttcgatgtaacccactcgtgcacccaactgatcttcagcatcttttactttcaccagcgtttctgggtgagcaaaaacaggaaggcaaaatgccgcaaaaaagggaataagggcgacacggaaatgttgaatactcatactcttcctttttcaatattattgaagcatttatcagggttattgtctcatgagcggatacatatttgaatgtatttagaaaaataaacaaataggggttccgcgcacatttccccgaaaagtgccacctgacgtctaagaaaccattattatcatgacattaacctataaaaataggcgtatcacgaggccctttcgtcggcgcgccgcggccgc

SEQ ID NO: 689 - DNA, 4624 bp, synthetic construct
  source 1..4624: mol_type = other DNA
caactttgtatagaaaagttggagggcctatttcccatgattccttcatatttgcatatacgatacaaggctgttagagagataattggaattaatttgactgtaaacacaaagatattagtacaaaatacgtgacgtagaaagtaataatttcttgggtagtttgcagttttaaaattatgttttaaaatggactatcatatgcttaccgtaacttgaaagtatttcgatttcttggctttatatatcttgtggaaaggacgaaacaccgtgcacacctcctggcgggcagctctgctgctgctaatgatgctgctgtgttctggcaatacctgcagcagcaacaaaagcagcagcagggaggcctgccctgactgcccactttttgtttttcaagtttgtacaaaaaagcaggctgggttgcgccttttccaaggcagccctgggtttgcgcagggacgcggctgctctgggcgtggttccgggaaacgcagcggcgccgaccctgggtctcgcacattcttcacgtccgttcgcagcgtcacccggatcttcgccgctacccttgtgggccccccggcgacgcttcctgctccgcccctaagtcgggaaggttccttgcggttcgcggcgtgccggacgtgacaaacggaagccgcacgtctcactagtaccctcgcagacggacagcgccagggagcaatggcagcgcgccgaccgcgatgggctgtggccaatagcggctgctcagcagggcgcgccgagagcagcggccgggaaggggcggtgcgggaggcggggtgtggggcggtagtgtgggccctgttcctgcccgcgcggtgttccgcattctgcaagcctccggagcgcacgtcggcagtcggctccctcgttgaccgaatcaccgacctctctccccaggacccagctttcttgtacaaagtgggccaccatggtgagcaagggcgaggagctgttcaccggggtggtgcccatcctggtcgagctggacggcgacgtaaacggccacaagttcagcgtgtccggcgagggcgagggcgatgccacctacggcaagctgaccctgaagttcatctgcaccaccggcaagctgcccgtgccctggcccaccctcgtgaccaccctgacctacggcgtgcagtgcttcagccgctaccccgaccacatgaagcagcacgacttcttcaagtccgccatgcccgaaggctacgtccaggagcgcaccatcttcttcaaggacgacggcaactacaagacccgcgccgaggtgaagttcgagggcgacaccctggtgaaccgcatcgagctgaagggcatcgacttcaaggaggacggcaacatcctggggcacaagctggagtacaactacaacagccacaacgtctatatcatggccgacaagcagaagaacggcatcaaggtgaacttcaagatccgccacaacatcgaggacggcagcgtgcagctcgccgaccactaccagcagaacacccccatcggcgacggccccgtgctgctgcccgacaaccactacctgagcacccagtccgccctgagcaaagaccccaacgagaagcgcgatcacatggtcctgctggagttcgtgaccgccgccgggatcactctcggcatggacgagctgtacaagggaagcggagagggcaggggaagtcttctaacatgcggggacgtggaggaaaatcccggccccatgaccgagtacaagcccacggtgcgcctcgccacccgcgacgacgtccccagggccgtacgcaccctcgccgccgcgttcgccgactaccccgccacgcgccacaccgtcgatccggaccgccacatcgagcgggtcaccgagctgcaagaactcttcctcacgcgcgtcgggctcgacatcggcaaggtgtgggtcgcggacgacggcgccgcggtggcggtctggaccacgccggagagcgtcgaagcgggggcggtgttcgccgagatcggcccgcgcatggccgagttgagcggttcccggctggccgcgcagcaacagatggaaggcctcctggcgccgcaccggcccaaggagcccgcgtggttcctggccaccgtcggcgtctcgcccgaccaccagggcaagggtctgggcagcgccgtcgtgctccccggagtggaggcggccgagcgcgccggggtgcccgccttcctggagacctccgcgccccgcaacctccccttctacgagcggctcggcttcaccgtcaccgccgacgtcgaggtgcccgaaggaccgcgcacctggtgcatgacccgcaagcccggtgcctgacaactttattatacatagttgatggccggccgcttcgagcagacatgataagatacattgatgagtttggacaaaccacaactagaatgcagtgaaaaaaatgctttatttgtgaaatttgtgatgctattgctttatttgtaaccattataagctgcaataaacaagttaacaacaacaattgcattcattttatgtttcaggttcagggggaggtgtgggaggttttttaaagcaagtaaaacctctacaaatgtggtagcggccgcggcgctcttccgcttcctcgctcactgactcgctgcgctcggtcgttcggctgcggcgagcggtatcagctcactcaaaggcggtaatacggttatccacagaatcaggggataacgcaggaaagaacatgtgagcaaaaggccagcaaaaggccaggaaccgtaaaaaggccgcgttgctggcgtttttccataggctccgcccccctgacgagcatcacaaaaatcgacgctcaagtcagaggtggcgaaacccgacaggactataaagataccaggcgtttccccctggaagctccctcgtgcgctctcctgttccgaccctgccgcttaccggatacctgtccgcctttctctcttcgggaagcgtggcgctttctcatagctcacgctgtaggtatctcagttcggtgtaggtcgttcgctccaagctgggctgtgtgcacgaaccccccgttcagcccgaccgctgcgccttatccggtaactatcgtcttgagtccaacccggtaagacacgacttatcgccactggcagcagccactggtaacaggattagcagagcgaggtatgtaggcggtgctacagagttcttgaagtggtggcctaactacggctacactagaagaacagtatttggtatctgcgctctgctgaagccagttaccttcggaaaaagagttggtagctcttgatccggcaaacaaaccaccgctggtagcggtggtttttttgtttgcaagcagcagattacgcgcagaaaaaaaggatctcaagaagatcctttgatcttttctacggggtctgacgctcagtggaacgaaaactcacgttaagggattttggtcatgagattatcaaaaaggatcttcacctagatccttttaaattaaaaatgaagttttaaatcaatctaaagtatatatgagtaaacttggtctgacagttaccaatgcttaatcagtgaggcacctatctcagcgatctgtctatttcgttcatccatagttgcctgactccccgtcgtgtagataactacgatacgggagggcttaccatctggccccagtgctgcaatgataccgcgagacccacgctcaccggctccagatttatcagcaataaaccagccagccggaagggccgagcgcagaagtggtcctgcaactttatccgcctccatccagtctattaattgttgccgggaagctagagtaagtagttcgccagttaatagtttgcgcaacgttgttgccattgctacaggcatcgtggtgtcacgctcgtcgtttggtatggcttcattcagctccggttcccaacgatcaaggcgagttacatgatcccccatgttgtgcaaaaaagcggttagctccttcggtcctccgatcgttgtcagaagtaagttggccgcagtgttatcactcatggttatggcagcactgcataattctcttactgtcatgccatccgtaagatgcttttctgtgactggtgagtactcaaccaagtcattctgagaatagtgtatgcggcgaccgagttgctcttgcccggcgtcaatacgggataataccgcgccacatagcagaactttaaaagtgctcatcattggaaaacgttcttcggggcgaaaactctcaaggatcttaccgctgttgagatccagttcgatgtaacccactcgtgcacccaactgatcttcagcatcttttactttcaccagcgtttctgggtgagcaaaaacaggaaggcaaaatgccgcaaaaaagggaataagggcgacacggaaatgttgaatactcatactcttcctttttcaatattattgaagcatttatcagggttattgtctcatgagcggatacatatttgaatgtatttagaaaaataaacaaataggggttccgcgcacatttccccgaaaagtgccacctgacgtctaagaaaccattattatcatgacattaacctataaaaataggcgtatcacgaggccctttcgtcggcgcgccgcggccgc

SEQ ID NO: 690 - DNA, 4624 bp, synthetic construct
  source 1..4624: mol_type = other DNA
caactttgtatagaaaagttggagggcctatttcccatgattccttcatatttgcatatacgatacaaggctgttagagagataattggaattaatttgactgtaaacacaaagatattagtacaaaatacgtgacgtagaaagtaataatttcttgggtagtttgcagttttaaaattatgttttaaaatggactatcatatgcttaccgtaacttgaaagtatttcgatttcttggctttatatatcttgtggaaaggacgaaacaccgtgcacacctcctggcgggcagctctgctgctgctaatgcagctgctgtgttctggcaatacctgcagcagcagcaaaagcagcagcagggaggcctgccctgactgcccactttttgtttttcaagtttgtacaaaaaagcaggctgggttgcgccttttccaaggcagccctgggtttgcgcagggacgcggctgctctgggcgtggttccgggaaacgcagcggcgccgaccctgggtctcgcacattcttcacgtccgttcgcagcgtcacccggatcttcgccgctacccttgtgggccccccggcgacgcttcctgctccgcccctaagtcgggaaggttccttgcggttcgcggcgtgccggacgtgacaaacggaagccgcacgtctcactagtaccctcgcagacggacagcgccagggagcaatggcagcgcgccgaccgcgatgggctgtggccaatagcggctgctcagcagggcgcgccgagagcagcggccgggaaggggcggtgcgggaggcggggtgtggggcggtagtgtgggccctgttcctgcccgcgcggtgttccgcattctgcaagcctccggagcgcacgtcggcagtcggctccctcgttgaccgaatcaccgacctctctccccaggacccagctttcttgtacaaagtgggccaccatggtgagcaagggcgaggagctgttcaccggggtggtgcccatcctggtcgagctggacggcgacgtaaacggccacaagttcagcgtgtccggcgagggcgagggcgatgccacctacggcaagctgaccctgaagttcatctgcaccaccggcaagctgcccgtgccctggcccaccctcgtgaccaccctgacctacggcgtgcagtgcttcagccgctaccccgaccacatgaagcagcacgacttcttcaagtccgccatgcccgaaggctacgtccaggagcgcaccatcttcttcaaggacgacggcaactacaagacccgcgccgaggtgaagttcgagggcgacaccctggtgaaccgcatcgagctgaagggcatcgacttcaaggaggacggcaacatcctggggcacaagctggagtacaactacaacagccacaacgtctatatcatggccgacaagcagaagaacggcatcaaggtgaacttcaagatccgccacaacatcgaggacggcagcgtgcagctcgccgaccactaccagcagaacacccccatcggcgacggccccgtgctgctgcccgacaaccactacctgagcacccagtccgccctgagcaaagaccccaacgagaagcgcgatcacatggtcctgctggagttcgtgaccgccgccgggatcactctcggcatggacgagctgtacaagggaagcggagagggcaggggaagtcttctaacatgcggggacgtggaggaaaatcccggccccatgaccgagtacaagcccacggtgcgcctcgccacccgcgacgacgtccccagggccgtacgcaccctcgccgccgcgttcgccgactaccccgccacgcgccacaccgtcgatccggaccgccacatcgagcgggtcaccgagctgcaagaactcttcctcacgcgcgtcgggctcgacatcggcaaggtgtgggtcgcggacgacggcgccgcggtggcggtctggaccacgccggagagcgtcgaagcgggggcggtgttcgccgagatcggcccgcgcatggccgagttgagcggttcccggctggccgcgcagcaacagatggaaggcctcctggcgccgcaccggcccaaggagcccgcgtggttcctggccaccgtcggcgtctcgcccgaccaccagggcaagggtctgggcagcgccgtcgtgctccccggagtggaggcggccgagcgcgccggggtgcccgccttcctggagacctccgcgccccgcaacctccccttctacgagcggctcggcttcaccgtcaccgccgacgtcgaggtgcccgaaggaccgcgcacctggtgcatgacccgcaagcccggtgcctgacaactttattatacatagttgatggccggccgcttcgagcagacatgataagatacattgatgagtttggacaaaccacaactagaatgcagtgaaaaaaatgctttatttgtgaaatttgtgatgctattgctttatttgtaaccattataagctgcaataaacaagttaacaacaacaattgcattcattttatgtttcaggttcagggggaggtgtgggaggttttttaaagcaagtaaaacctctacaaatgtggtagcggccgcggcgctcttccgcttcctcgctcactgactcgctgcgctcggtcgttcggctgcggcgagcggtatcagctcactcaaaggcggtaatacggttatccacagaatcaggggataacgcaggaaagaacatgtgagcaaaaggccagcaaaaggccaggaaccgtaaaaaggccgcgttgctggcgtttttccataggctccgcccccctgacgagcatcacaaaaatcgacgctcaagtcagaggtggcgaaacccgacaggactataaagataccaggcgtttccccctggaagctccctcgtgcgctctcctgttccgaccctgccgcttaccggatacctgtccgcctttctctcttcgggaagcgtggcgctttctcatagctcacgctgtaggtatctcagttcggtgtaggtcgttcgctccaagctgggctgtgtgcacgaaccccccgttcagcccgaccgctgcgccttatccggtaactatcgtcttgagtccaacccggtaagacacgacttatcgccactggcagcagccactggtaacaggattagcagagcgaggtatgtaggcggtgctacagagttcttgaagtggtggcctaactacggctacactagaagaacagtatttggtatctgcgctctgctgaagccagttaccttcggaaaaagagttggtagctcttgatccggcaaacaaaccaccgctggtagcggtggtttttttgtttgcaagcagcagattacgcgcagaaaaaaaggatctcaagaagatcctttgatcttttctacggggtctgacgctcagtggaacgaaaactcacgttaagggattttggtcatgagattatcaaaaaggatcttcacctagatccttttaaattaaaaatgaagttttaaatcaatctaaagtatatatgagtaaacttggtctgacagttaccaatgcttaatcagtgaggcacctatctcagcgatctgtctatttcgttcatccatagttgcctgactccccgtcgtgtagataactacgatacgggagggcttaccatctggccccagtgctgcaatgataccgcgagacccacgctcaccggctccagatttatcagcaataaaccagccagccggaagggccgagcgcagaagtggtcctgcaactttatccgcctccatccagtctattaattgttgccgggaagctagagtaagtagttcgccagttaatagtttgcgcaacgttgttgccattgctacaggcatcgtggtgtcacgctcgtcgtttggtatggcttcattcagctccggttcccaacgatcaaggcgagttacatgatcccccatgttgtgcaaaaaagcggttagctccttcggtcctccgatcgttgtcagaagtaagttggccgcagtgttatcactcatggttatggcagcactgcataattctcttactgtcatgccatccgtaagatgcttttctgtgactggtgagtactcaaccaagtcattctgagaatagtgtatgcggcgaccgagttgctcttgcccggcgtcaatacgggataataccgcgccacatagcagaactttaaaagtgctcatcattggaaaacgttcttcggggcgaaaactctcaaggatcttaccgctgttgagatccagttcgatgtaacccactcgtgcacccaactgatcttcagcatcttttactttcaccagcgtttctgggtgagcaaaaacaggaaggcaaaatgccgcaaaaaagggaataagggcgacacggaaatgttgaatactcatactcttcctttttcaatattattgaagcatttatcagggttattgtctcatgagcggatacatatttgaatgtatttagaaaaataaacaaataggggttccgcgcacatttccccgaaaagtgccacctgacgtctaagaaaccattattatcatgacattaacctataaaaataggcgtatcacgaggccctttcgtcggcgcgccgcggccgc

SEQ ID NO: 691 - DNA, 4624 bp, synthetic construct
  source 1..4624: mol_type = other DNA
caactttgtatagaaaagttggagggcctatttcccatgattccttcatatttgcatatacgatacaaggctgttagagagataattggaattaatttgactgtaaacacaaagatattagtacaaaatacgtgacgtagaaagtaataatttcttgggtagtttgcagttttaaaattatgttttaaaatggactatcatatgcttaccgtaacttgaaagtatttcgatttcttggctttatatatcttgtggaaaggacgaaacaccgtgcacacctcctggcgggcagctctgctgctgctaatgctactgctgtgttctggcaatacctgcagcagaagcaaaagcagcagcagggaggcctgccctgactgcccactttttgtttttcaagtttgtacaaaaaagcaggctgggttgcgccttttccaaggcagccctgggtttgcgcagggacgcggctgctctgggcgtggttccgggaaacgcagcggcgccgaccctgggtctcgcacattcttcacgtccgttcgcagcgtcacccggatcttcgccgctacccttgtgggccccccggcgacgcttcctgctccgcccctaagtcgggaaggttccttgcggttcgcggcgtgccggacgtgacaaacggaagccgcacgtctcactagtaccctcgcagacggacagcgccagggagcaatggcagcgcgccgaccgcgatgggctgtggccaatagcggctgctcagcagggcgcgccgagagcagcggccgggaaggggcggtgcgggaggcggggtgtggggcggtagtgtgggccctgttcctgcccgcgcggtgttccgcattctgcaagcctccggagcgcacgtcggcagtcggctccctcgttgaccgaatcaccgacctctctccccaggacccagctttcttgtacaaagtgggccaccatggtgagcaagggcgaggagctgttcaccggggtggtgcccatcctggtcgagctggacggcgacgtaaacggccacaagttcagcgtgtccggcgagggcgagggcgatgccacctacggcaagctgaccctgaagttcatctgcaccaccggcaagctgcccgtgccctggcccaccctcgtgaccaccctgacctacggcgtgcagtgcttcagccgctaccccgaccacatgaagcagcacgacttcttcaagtccgccatgcccgaaggctacgtccaggagcgcaccatcttcttcaaggacgacggcaactacaagacccgcgccgaggtgaagttcgagggcgacaccctggtgaaccgcatcgagctgaagggcatcgacttcaaggaggacggcaacatcctggggcacaagctggagtacaactacaacagccacaacgtctatatcatggccgacaagcagaagaacggcatcaaggtgaacttcaagatccgccacaacatcgaggacggcagcgtgcagctcgccgaccactaccagcagaacacccccatcggcgacggccccgtgctgctgcccgacaaccactacctgagcacccagtccgccctgagcaaagaccccaacgagaagcgcgatcacatggtcctgctggagttcgtgaccgccgccgggatcactctcggcatggacgagctgtacaagggaagcggagagggcaggggaagtcttctaacatgcggggacgtggaggaaaatcccggccccatgaccgagtacaagcccacggtgcgcctcgccacccgcgacgacgtccccagggccgtacgcaccctcgccgccgcgttcgccgactaccccgccacgcgccacaccgtcgatccggaccgccacatcgagcgggtcaccgagctgcaagaactcttcctcacgcgcgtcgggctcgacatcggcaaggtgtgggtcgcggacgacggcgccgcggtggcggtctggaccacgccggagagcgtcgaagcgggggcggtgttcgccgagatcggcccgcgcatggccgagttgagcggttcccggctggccgcgcagcaacagatggaaggcctcctggcgccgcaccggcccaaggagcccgcgtggttcctggccaccgtcggcgtctcgcccgaccaccagggcaagggtctgggcagcgccgtcgtgctccccggagtggaggcggccgagcgcgccggggtgcccgccttcctggagacctccgcgccccgcaacctccccttctacgagcggctcggcttcaccgtcaccgccgacgtcgaggtgcccgaaggaccgcgcacctggtgcatgacccgcaagcccggtgcctgacaactttattatacatagttgatggccggccgcttcgagcagacatgataagatacattgatgagtttggacaaaccacaactagaatgcagtgaaaaaaatgctttatttgtgaaatttgtgatgctattgctttatttgtaaccattataagctgcaataaacaagttaacaacaacaattgcattcattttatgtttcaggttcagggggaggtgtgggaggttttttaaagcaagtaaaacctctacaaatgtggtagcggccgcggcgctcttccgcttcctcgctcactgactcgctgcgctcggtcgttcggctgcggcgagcggtatcagctcactcaaaggcggtaatacggttatccacagaatcaggggataacgcaggaaagaacatgtgagcaaaaggccagcaaaaggccaggaaccgtaaaaaggccgcgttgctggcgtttttccataggctccgcccccctgacgagcatcacaaaaatcgacgctcaagtcagaggtggcgaaacccgacaggactataaagataccaggcgtttccccctggaagctccctcgtgcgctctcctgttccgaccctgccgcttaccggatacctgtccgcctttctctcttcgggaagcgtggcgctttctcatagctcacgctgtaggtatctcagttcggtgtaggtcgttcgctccaagctgggctgtgtgcacgaaccccccgttcagcccgaccgctgcgccttatccggtaactatcgtcttgagtccaacccggtaagacacgacttatcgccactggcagcagccactggtaacaggattagcagagcgaggtatgtaggcggtgctacagagttcttgaagtggtggcctaactacggctacactagaagaacagtatttggtatctgcgctctgctgaagccagttaccttcggaaaaagagttggtagctcttgatccggcaaacaaaccaccgctggtagcggtggtttttttgtttgcaagcagcagattacgcgcagaaaaaaaggatctcaagaagatcctttgatcttttctacggggtctgacgctcagtggaacgaaaactcacgttaagggattttggtcatgagattatcaaaaaggatcttcacctagatccttttaaattaaaaatgaagttttaaatcaatctaaagtatatatgagtaaacttggtctgacagttaccaatgcttaatcagtgaggcacctatctcagcgatctgtctatttcgttcatccatagttgcctgactccccgtcgtgtagataactacgatacgggagggcttaccatctggccccagtgctgcaatgataccgcgagacccacgctcaccggctccagatttatcagcaataaaccagccagccggaagggccgagcgcagaagtggtcctgcaactttatccgcctccatccagtctattaattgttgccgggaagctagagtaagtagttcgccagttaatagtttgcgcaacgttgttgccattgctacaggcatcgtggtgtcacgctcgtcgtttggtatggcttcattcagctccggttcccaacgatcaaggcgagttacatgatcccccatgttgtgcaaaaaagcggttagctccttcggtcctccgatcgttgtcagaagtaagttggccgcagtgttatcactcatggttatggcagcactgcataattctcttactgtcatgccatccgtaagatgcttttctgtgactggtgagtactcaaccaagtcattctgagaatagtgtatgcggcgaccgagttgctcttgcccggcgtcaatacgggataataccgcgccacatagcagaactttaaaagtgctcatcattggaaaacgttcttcggggcgaaaactctcaaggatcttaccgctgttgagatccagttcgatgtaacccactcgtgcacccaactgatcttcagcatcttttactttcaccagcgtttctgggtgagcaaaaacaggaaggcaaaatgccgcaaaaaagggaataagggcgacacggaaatgttgaatactcatactcttcctttttcaatattattgaagcatttatcagggttattgtctcatgagcggatacatatttgaatgtatttagaaaaataaacaaataggggttccgcgcacatttccccgaaaagtgccacctgacgtctaagaaaccattattatcatgacattaacctataaaaataggcgtatcacgaggccctttcgtcggcgcgccgcggccgc

SEQ ID NO: 692 - DNA, 4624 bp, synthetic construct
  source 1..4624: mol_type = other DNA
caactttgtatagaaaagttggagggcctatttcccatgattccttcatatttgcatatacgatacaaggctgttagagagataattggaattaatttgactgtaaacacaaagatattagtacaaaatacgtgacgtagaaagtaataatttcttgggtagtttgcagttttaaaattatgttttaaaatggactatcatatgcttaccgtaacttgaaagtatttcgatttcttggctttatatatcttgtggaaaggacgaaacaccgtgcacacctcctggcgggcagctctgctgctgctacagatgctgctgtgttctggcaatacctgcagcagcaacagaagcagcagcagggaggcctgccctgactgcccactttttgtttttcaagtttgtacaaaaaagcaggctgggttgcgccttttccaaggcagccctgggtttgcgcagggacgcggctgctctgggcgtggttccgggaaacgcagcggcgccgaccctgggtctcgcacattcttcacgtccgttcgcagcgtcacccggatcttcgccgctacccttgtgggccccccggcgacgcttcctgctccgcccctaagtcgggaaggttccttgcggttcgcggcgtgccggacgtgacaaacggaagccgcacgtctcactagtaccctcgcagacggacagcgccagggagcaatggcagcgcgccgaccgcgatgggctgtggccaatagcggctgctcagcagggcgcgccgagagcagcggccgggaaggggcggtgcgggaggcggggtgtggggcggtagtgtgggccctgttcctgcccgcgcggtgttccgcattctgcaagcctccggagcgcacgtcggcagtcggctccctcgttgaccgaatcaccgacctctctccccaggacccagctttcttgtacaaagtgggccaccatggtgagcaagggcgaggagctgttcaccggggtggtgcccatcctggtcgagctggacggcgacgtaaacggccacaagttcagcgtgtccggcgagggcgagggcgatgccacctacggcaagctgaccctgaagttcatctgcaccaccggcaagctgcccgtgccctggcccaccctcgtgaccaccctgacctacggcgtgcagtgcttcagccgctaccccgaccacatgaagcagcacgacttcttcaagtccgccatgcccgaaggctacgtccaggagcgcaccatcttcttcaaggacgacggcaactacaagacccgcgccgaggtgaagttcgagggcgacaccctggtgaaccgcatcgagctgaagggcatcgacttcaaggaggacggcaacatcctggggcacaagctggagtacaactacaacagccacaacgtctatatcatggccgacaagcagaagaacggcatcaaggtgaacttcaagatccgccacaacatcgaggacggcagcgtgcagctcgccgaccactaccagcagaacacccccatcggcgacggccccgtgctgctgcccgacaaccactacctgagcacccagtccgccctgagcaaagaccccaacgagaagcgcgatcacatggtcctgctggagttcgtgaccgccgccgggatcactctcggcatggacgagctgtacaagggaagcggagagggcaggggaagtcttctaacatgcggggacgtggaggaaaatcccggccccatgaccgagtacaagcccacggtgcgcctcgccacccgcgacgacgtccccagggccgtacgcaccctcgccgccgcgttcgccgactaccccgccacgcgccacaccgtcgatccggaccgccacatcgagcgggtcaccgagctgcaagaactcttcctcacgcgcgtcgggctcgacatcggcaaggtgtgggtcgcggacgacggcgccgcggtggcggtctggaccacgccggagagcgtcgaagcgggggcggtgttcgccgagatcggcccgcgcatggccgagttgagcggttcccggctggccgcgcagcaacagatggaaggcctcctggcgccgcaccggcccaaggagcccgcgtggttcctggccaccgtcggcgtctcgcccgaccaccagggcaagggtctgggcagcgccgtcgtgctccccggagtggaggcggccgagcgcgccggggtgcccgccttcctggagacctccgcgccccgcaacctccccttctacgagcggctcggcttcaccgtcaccgccgacgtcgaggtgcccgaaggaccgcgcacctggtgcatgacccgcaagcccggtgcctgacaactttattatacatagttgatggccggccgcttcgagcagacatgataagatacattgatgagtttggacaaaccacaactagaatgcagtgaaaaaaatgctttatttgtgaaatttgtgatgctattgctttatttgtaaccattataagctgcaataaacaagttaacaacaacaattgcattcattttatgtttcaggttcagggggaggtgtgggaggttttttaaagcaagtaaaacctctacaaatgtggtagcggccgcggcgctcttccgcttcctcgctcactgactcgctgcgctcggtcgttcggctgcggcgagcggtatcagctcactcaaaggcggtaatacggttatccacagaatcaggggataacgcaggaaagaacatgtgagcaaaaggccagcaaaaggccaggaaccgtaaaaaggccgcgttgctggcgtttttccataggctccgcccccctgacgagcatcacaaaaatcgacgctcaagtcagaggtggcgaaacccgacaggactataaagataccaggcgtttccccctggaagctccctcgtgcgctctcctgttccgaccctgccgcttaccggatacctgtccgcctttctctcttcgggaagcgtggcgctttctcatagctcacgctgtaggtatctcagttcggtgtaggtcgttcgctccaagctgggctgtgtgcacgaaccccccgttcagcccgaccgctgcgccttatccggtaactatcgtcttgagtccaacccggtaagacacgacttatcgccactggcagcagccactggtaacaggattagcagagcgaggtatgtaggcggtgctacagagttcttgaagtggtggcctaactacggctacactagaagaacagtatttggtatctgcgctctgctgaagccagttaccttcggaaaaagagttggtagctcttgatccggcaaacaaaccaccgctggtagcggtggtttttttgtttgcaagcagcagattacgcgcagaaaaaaaggatctcaagaagatcctttgatcttttctacggggtctgacgctcagtggaacgaaaactcacgttaagggattttggtcatgagattatcaaaaaggatcttcacctagatccttttaaattaaaaatgaagttttaaatcaatctaaagtatatatgagtaaacttggtctgacagttaccaatgcttaatcagtgaggcacctatctcagcgatctgtctatttcgttcatccatagttgcctgactccccgtcgtgtagataactacgatacgggagggcttaccatctggccccagtgctgcaatgataccgcgagacccacgctcaccggctccagatttatcagcaataaaccagccagccggaagggccgagcgcagaagtggtcctgcaactttatccgcctccatccagtctattaattgttgccgggaagctagagtaagtagttcgccagttaatagtttgcgcaacgttgttgccattgctacaggcatcgtggtgtcacgctcgtcgtttggtatggcttcattcagctccggttcccaacgatcaaggcgagttacatgatcccccatgttgtgcaaaaaagcggttagctccttcggtcctccgatcgttgtcagaagtaagttggccgcagtgttatcactcatggttatggcagcactgcataattctcttactgtcatgccatccgtaagatgcttttctgtgactggtgagtactcaaccaagtcattctgagaatagtgtatgcggcgaccgagttgctcttgcccggcgtcaatacgggataataccgcgccacatagcagaactttaaaagtgctcatcattggaaaacgttcttcggggcgaaaactctcaaggatcttaccgctgttgagatccagttcgatgtaacccactcgtgcacccaactgatcttcagcatcttttactttcaccagcgtttctgggtgagcaaaaacaggaaggcaaaatgccgcaaaaaagggaataagggcgacacggaaatgttgaatactcatactcttcctttttcaatattattgaagcatttatcagggttattgtctcatgagcggatacatatttgaatgtatttagaaaaataaacaaataggggttccgcgcacatttccccgaaaagtgccacctgacgtctaagaaaccattattatcatgacattaacctataaaaataggcgtatcacgaggccctttcgtcggcgcgccgcggccgc

SEQ ID NO: 693 - DNA, 4624 bp, synthetic construct
  source 1..4624: mol_type = other DNA
caactttgtatagaaaagttggagggcctatttcccatgattccttcatatttgcatatacgatacaaggctgttagagagataattggaattaatttgactgtaaacacaaagatattagtacaaaatacgtgacgtagaaagtaataatttcttgggtagtttgcagttttaaaattatgttttaaaatggactatcatatgcttaccgtaacttgaaagtatttcgatttcttggctttatatatcttgtggaaaggacgaaacaccgtgcacacctcctggcgggcagctctgctgctgctacagcagctgctgtgttctggcaatacctgcagcagcagcagaagcagcagcagggaggcctgccctgactgcccactttttgtttttcaagtttgtacaaaaaagcaggctgggttgcgccttttccaaggcagccctgggtttgcgcagggacgcggctgctctgggcgtggttccgggaaacgcagcggcgccgaccctgggtctcgcacattcttcacgtccgttcgcagcgtcacccggatcttcgccgctacccttgtgggccccccggcgacgcttcctgctccgcccctaagtcgggaaggttccttgcggttcgcggcgtgccggacgtgacaaacggaagccgcacgtctcactagtaccctcgcagacggacagcgccagggagcaatggcagcgcgccgaccgcgatgggctgtggccaatagcggctgctcagcagggcgcgccgagagcagcggccgggaaggggcggtgcgggaggcggggtgtggggcggtagtgtgggccctgttcctgcccgcgcggtgttccgcattctgcaagcctccggagcgcacgtcggcagtcggctccctcgttgaccgaatcaccgacctctctccccaggacccagctttcttgtacaaagtgggccaccatggtgagcaagggcgaggagctgttcaccggggtggtgcccatcctggtcgagctggacggcgacgtaaacggccacaagttcagcgtgtccggcgagggcgagggcgatgccacctacggcaagctgaccctgaagttcatctgcaccaccggcaagctgcccgtgccctggcccaccctcgtgaccaccctgacctacggcgtgcagtgcttcagccgctaccccgaccacatgaagcagcacgacttcttcaagtccgccatgcccgaaggctacgtccaggagcgcaccatcttcttcaaggacgacggcaactacaagacccgcgccgaggtgaagttcgagggcgacaccctggtgaaccgcatcgagctgaagggcatcgacttcaaggaggacggcaacatcctggggcacaagctggagtacaactacaacagccacaacgtctatatcatggccgacaagcagaagaacggcatcaaggtgaacttcaagatccgccacaacatcgaggacggcagcgtgcagctcgccgaccactaccagcagaacacccccatcggcgacggccccgtgctgctgcccgacaaccactacctgagcacccagtccgccctgagcaaagaccccaacgagaagcgcgatcacatggtcctgctggagttcgtgaccgccgccgggatcactctcggcatggacgagctgtacaagggaagcggagagggcaggggaagtcttctaacatgcggggacgtggaggaaaatcccggccccatgaccgagtacaagcccacggtgcgcctcgccacccgcgacgacgtccccagggccgtacgcaccctcgccgccgcgttcgccgactaccccgccacgcgccacaccgtcgatccggaccgccacatcgagcgggtcaccgagctgcaagaactcttcctcacgcgcgtcgggctcgacatcggcaaggtgtgggtcgcggacgacggcgccgcggtggcggtctggaccacgccggagagcgtcgaagcgggggcggtgttcgccgagatcggcccgcgcatggccgagttgagcggttcccggctggccgcgcagcaacagatggaaggcctcctggcgccgcaccggcccaaggagcccgcgtggttcctggccaccgtcggcgtctcgcccgaccaccagggcaagggtctgggcagcgccgtcgtgctccccggagtggaggcggccgagcgcgccggggtgcccgccttcctggagacctccgcgccccgcaacctccccttctacgagcggctcggcttcaccgtcaccgccgacgtcgaggtgcccgaaggaccgcgcacctggtgcatgacccgcaagcccggtgcctgacaactttattatacatagttgatggccggccgcttcgagcagacatgataagatacattgatgagtttggacaaaccacaactagaatgcagtgaaaaaaatgctttatttgtgaaatttgtgatgctattgctttatttgtaaccattataagctgcaataaacaagttaacaacaacaattgcattcattttatgtttcaggttcagggggaggtgtgggaggttttttaaagcaagtaaaacctctacaaatgtggtagcggccgcggcgctcttccgcttcctcgctcactgactcgctgcgctcggtcgttcggctgcggcgagcggtatcagctcactcaaaggcggtaatacggttatccacagaatcaggggataacgcaggaaagaacatgtgagcaaaaggccagcaaaaggccaggaaccgtaaaaaggccgcgttgctggcgtttttccataggctccgcccccctgacgagcatcacaaaaatcgacgctcaagtcagaggtggcgaaacccgacaggactataaagataccaggcgtttccccctggaagctccctcgtgcgctctcctgttccgaccctgccgcttaccggatacctgtccgcctttctctcttcgggaagcgtggcgctttctcatagctcacgctgtaggtatctcagttcggtgtaggtcgttcgctccaagctgggctgtgtgcacgaaccccccgttcagcccgaccgctgcgccttatccggtaactatcgtcttgagtccaacccggtaagacacgacttatcgccactggcagcagccactggtaacaggattagcagagcgaggtatgtaggcggtgctacagagttcttgaagtggtggcctaactacggctacactagaagaacagtatttggtatctgcgctctgctgaagccagttaccttcggaaaaagagttggtagctcttgatccggcaaacaaaccaccgctggtagcggtggtttttttgtttgcaagcagcagattacgcgcagaaaaaaaggatctcaagaagatcctttgatcttttctacggggtctgacgctcagtggaacgaaaactcacgttaagggattttggtcatgagattatcaaaaaggatcttcacctagatccttttaaattaaaaatgaagttttaaatcaatctaaagtatatatgagtaaacttggtctgacagttaccaatgcttaatcagtgaggcacctatctcagcgatctgtctatttcgttcatccatagttgcctgactccccgtcgtgtagataactacgatacgggagggcttaccatctggccccagtgctgcaatgataccgcgagacccacgctcaccggctccagatttatcagcaataaaccagccagccggaagggccgagcgcagaagtggtcctgcaactttatccgcctccatccagtctattaattgttgccgggaagctagagtaagtagttcgccagttaatagtttgcgcaacgttgttgccattgctacaggcatcgtggtgtcacgctcgtcgtttggtatggcttcattcagctccggttcccaacgatcaaggcgagttacatgatcccccatgttgtgcaaaaaagcggttagctccttcggtcctccgatcgttgtcagaagtaagttggccgcagtgttatcactcatggttatggcagcactgcataattctcttactgtcatgccatccgtaagatgcttttctgtgactggtgagtactcaaccaagtcattctgagaatagtgtatgcggcgaccgagttgctcttgcccggcgtcaatacgggataataccgcgccacatagcagaactttaaaagtgctcatcattggaaaacgttcttcggggcgaaaactctcaaggatcttaccgctgttgagatccagttcgatgtaacccactcgtgcacccaactgatcttcagcatcttttactttcaccagcgtttctgggtgagcaaaaacaggaaggcaaaatgccgcaaaaaagggaataagggcgacacggaaatgttgaatactcatactcttcctttttcaatattattgaagcatttatcagggttattgtctcatgagcggatacatatttgaatgtatttagaaaaataaacaaataggggttccgcgcacatttccccgaaaagtgccacctgacgtctaagaaaccattattatcatgacattaacctataaaaataggcgtatcacgaggccctttcgtcggcgcgccgcggccgc

SEQ ID NO: 694 - DNA, 4624 bp, synthetic construct
  source 1..4624: mol_type = other DNA
caactttgtatagaaaagttggagggcctatttcccatgattccttcatatttgcatatacgatacaaggctgttagagagataattggaattaatttgactgtaaacacaaagatattagtacaaaatacgtgacgtagaaagtaataatttcttgggtagtttgcagttttaaaattatgttttaaaatggactatcatatgcttaccgtaacttgaaagtatttcgatttcttggctttatatatcttgtggaaaggacgaaacaccgtgcacacctcctggcgggcagctctgctgctgctacagctgatgctgtgttctggcaatacctgcagcaacagcagaagcagcagcagggaggcctgccctgactgcccactttttgtttttcaagtttgtacaaaaaagcaggctgggttgcgccttttccaaggcagccctgggtttgcgcagggacgcggctgctctgggcgtggttccgggaaacgcagcggcgccgaccctgggtctcgcacattcttcacgtccgttcgcagcgtcacccggatcttcgccgctacccttgtgggccccccggcgacgcttcctgctccgcccctaagtcgggaaggttccttgcggttcgcggcgtgccggacgtgacaaacggaagccgcacgtctcactagtaccctcgcagacggacagcgccagggagcaatggcagcgcgccgaccgcgatgggctgtggccaatagcggctgctcagcagggcgcgccgagagcagcggccgggaaggggcggtgcgggaggcggggtgtggggcggtagtgtgggccctgttcctgcccgcgcggtgttccgcattctgcaagcctccggagcgcacgtcggcagtcggctccctcgttgaccgaatcaccgacctctctccccaggacccagctttcttgtacaaagtgggccaccatggtgagcaagggcgaggagctgttcaccggggtggtgcccatcctggtcgagctggacggcgacgtaaacggccacaagttcagcgtgtccggcgagggcgagggcgatgccacctacggcaagctgaccctgaagttcatctgcaccaccggcaagctgcccgtgccctggcccaccctcgtgaccaccctgacctacggcgtgcagtgcttcagccgctaccccgaccacatgaagcagcacgacttcttcaagtccgccatgcccgaaggctacgtccaggagcgcaccatcttcttcaaggacgacggcaactacaagacccgcgccgaggtgaagttcgagggcgacaccctggtgaaccgcatcgagctgaagggcatcgacttcaaggaggacggcaacatcctggggcacaagctggagtacaactacaacagccacaacgtctatatcatggccgacaagcagaagaacggcatcaaggtgaacttcaagatccgccacaacatcgaggacggcagcgtgcagctcgccgaccactaccagcagaacacccccatcggcgacggccccgtgctgctgcccgacaaccactacctgagcacccagtccgccctgagcaaagaccccaacgagaagcgcgatcacatggtcctgctggagttcgtgaccgccgccgggatcactctcggcatggacgagctgtacaagggaagcggagagggcaggggaagtcttctaacatgcggggacgtggaggaaaatcccggccccatgaccgagtacaagcccacggtgcgcctcgccacccgcgacgacgtccccagggccgtacgcaccctcgccgccgcgttcgccgactaccccgccacgcgccacaccgtcgatccggaccgccacatcgagcgggtcaccgagctgcaagaactcttcctcacgcgcgtcgggctcgacatcggcaaggtgtgggtcgcggacgacggcgccgcggtggcggtctggaccacgccggagagcgtcgaagcgggggcggtgttcgccgagatcggcccgcgcatggccgagttgagcggttcccggctggccgcgcagcaacagatggaaggcctcctggcgccgcaccggcccaaggagcccgcgtggttcctggccaccgtcggcgtctcgcccgaccaccagggcaagggtctgggcagcgccgtcgtgctccccggagtggaggcggccgagcgcgccggggtgcccgccttcctggagacctccgcgccccgcaacctccccttctacgagcggctcggcttcaccgtcaccgccgacgtcgaggtgcccgaaggaccgcgcacctggtgcatgacccgcaagcccggtgcctgacaactttattatacatagttgatggccggccgcttcgagcagacatgataagatacattgatgagtttggacaaaccacaactagaatgcagtgaaaaaaatgctttatttgtgaaatttgtgatgctattgctttatttgtaaccattataagctgcaataaacaagttaacaacaacaattgcattcattttatgtttcaggttcagggggaggtgtgggaggttttttaaagcaagtaaaacctctacaaatgtggtagcggccgcggcgctcttccgcttcctcgctcactgactcgctgcgctcggtcgttcggctgcggcgagcggtatcagctcactcaaaggcggtaatacggttatccacagaatcaggggataacgcaggaaagaacatgtgagcaaaaggccagcaaaaggccaggaaccgtaaaaaggccgcgttgctggcgtttttccataggctccgcccccctgacgagcatcacaaaaatcgacgctcaagtcagaggtggcgaaacccgacaggactataaagataccaggcgtttccccctggaagctccctcgtgcgctctcctgttccgaccctgccgcttaccggatacctgtccgcctttctctcttcgggaagcgtggcgctttctcatagctcacgctgtaggtatctcagttcggtgtaggtcgttcgctccaagctgggctgtgtgcacgaaccccccgttcagcccgaccgctgcgccttatccggtaactatcgtcttgagtccaacccggtaagacacgacttatcgccactggcagcagccactggtaacaggattagcagagcgaggtatgtaggcggtgctacagagttcttgaagtggtggcctaactacggctacactagaagaacagtatttggtatctgcgctctgctgaagccagttaccttcggaaaaagagttggtagctcttgatccggcaaacaaaccaccgctggtagcggtggtttttttgtttgcaagcagcagattacgcgcagaaaaaaaggatctcaagaagatcctttgatcttttctacggggtctgacgctcagtggaacgaaaactcacgttaagggattttggtcatgagattatcaaaaaggatcttcacctagatccttttaaattaaaaatgaagttttaaatcaatctaaagtatatatgagtaaacttggtctgacagttaccaatgcttaatcagtgaggcacctatctcagcgatctgtctatttcgttcatccatagttgcctgactccccgtcgtgtagataactacgatacgggagggcttaccatctggccccagtgctgcaatgataccgcgagacccacgctcaccggctccagatttatcagcaataaaccagccagccggaagggccgagcgcagaagtggtcctgcaactttatccgcctccatccagtctattaattgttgccgggaagctagagtaagtagttcgccagttaatagtttgcgcaacgttgttgccattgctacaggcatcgtggtgtcacgctcgtcgtttggtatggcttcattcagctccggttcccaacgatcaaggcgagttacatgatcccccatgttgtgcaaaaaagcggttagctccttcggtcctccgatcgttgtcagaagtaagttggccgcagtgttatcactcatggttatggcagcactgcataattctcttactgtcatgccatccgtaagatgcttttctgtgactggtgagtactcaaccaagtcattctgagaatagtgtatgcggcgaccgagttgctcttgcccggcgtcaatacgggataataccgcgccacatagcagaactttaaaagtgctcatcattggaaaacgttcttcggggcgaaaactctcaaggatcttaccgctgttgagatccagttcgatgtaacccactcgtgcacccaactgatcttcagcatcttttactttcaccagcgtttctgggtgagcaaaaacaggaaggcaaaatgccgcaaaaaagggaataagggcgacacggaaatgttgaatactcatactcttcctttttcaatattattgaagcatttatcagggttattgtctcatgagcggatacatatttgaatgtatttagaaaaataaacaaataggggttccgcgcacatttccccgaaaagtgccacctgacgtctaagaaaccattattatcatgacattaacctataaaaataggcgtatcacgaggccctttcgtcggcgcgccgcggccgc

SEQ ID NO: 695 - DNA, 4624 bp, synthetic construct
  source 1..4624: mol_type = other DNA
caactttgtatagaaaagttggagggcctatttcccatgattccttcatatttgcatatacgatacaaggctgttagagagataattggaattaatttgactgtaaacacaaagatattagtacaaaatacgtgacgtagaaagtaataatttcttgggtagtttgcagttttaaaattatgttttaaaatggactatcatatgcttaccgtaacttgaaagtatttcgatttcttggctttatatatcttgtggaaaggacgaaacaccgtgcacacctcctggcgggcagctctgctgctgctgaagatgctgctgtgttctggcaatacctgcagcagcaacaacagcagcagcagggaggcctgccctgactgcccactttttgtttttcaagtttgtacaaaaaagcaggctgggttgcgccttttccaaggcagccctgggtttgcgcagggacgcggctgctctgggcgtggttccgggaaacgcagcggcgccgaccctgggtctcgcacattcttcacgtccgttcgcagcgtcacccggatcttcgccgctacccttgtgggccccccggcgacgcttcctgctccgcccctaagtcgggaaggttccttgcggttcgcggcgtgccggacgtgacaaacggaagccgcacgtctcactagtaccctcgcagacggacagcgccagggagcaatggcagcgcgccgaccgcgatgggctgtggccaatagcggctgctcagcagggcgcgccgagagcagcggccgggaaggggcggtgcgggaggcggggtgtggggcggtagtgtgggccctgttcctgcccgcgcggtgttccgcattctgcaagcctccggagcgcacgtcggcagtcggctccctcgttgaccgaatcaccgacctctctccccaggacccagctttcttgtacaaagtgggccaccatggtgagcaagggcgaggagctgttcaccggggtggtgcccatcctggtcgagctggacggcgacgtaaacggccacaagttcagcgtgtccggcgagggcgagggcgatgccacctacggcaagctgaccctgaagttcatctgcaccaccggcaagctgcccgtgccctggcccaccctcgtgaccaccctgacctacggcgtgcagtgcttcagccgctaccccgaccacatgaagcagcacgacttcttcaagtccgccatgcccgaaggctacgtccaggagcgcaccatcttcttcaaggacgacggcaactacaagacccgcgccgaggtgaagttcgagggcgacaccctggtgaaccgcatcgagctgaagggcatcgacttcaaggaggacggcaacatcctggggcacaagctggagtacaactacaacagccacaacgtctatatcatggccgacaagcagaagaacggcatcaaggtgaacttcaagatccgccacaacatcgaggacggcagcgtgcagctcgccgaccactaccagcagaacacccccatcggcgacggccccgtgctgctgcccgacaaccactacctgagcacccagtccgccctgagcaaagaccccaacgagaagcgcgatcacatggtcctgctggagttcgtgaccgccgccgggatcactctcggcatggacgagctgtacaagggaagcggagagggcaggggaagtcttctaacatgcggggacgtggaggaaaatcccggccccatgaccgagtacaagcccacggtgcgcctcgccacccgcgacgacgtccccagggccgtacgcaccctcgccgccgcgttcgccgactaccccgccacgcgccacaccgtcgatccggaccgccacatcgagcgggtcaccgagctgcaagaactcttcctcacgcgcgtcgggctcgacatcggcaaggtgtgggtcgcggacgacggcgccgcggtggcggtctggaccacgccggagagcgtcgaagcgggggcggtgttcgccgagatcggcccgcgcatggccgagttgagcggttcccggctggccgcgcagcaacagatggaaggcctcctggcgccgcaccggcccaaggagcccgcgtggttcctggccaccgtcggcgtctcgcccgaccaccagggcaagggtctgggcagcgccgtcgtgctccccggagtggaggcggccgagcgcgccggggtgcccgccttcctggagacctccgcgccccgcaacctccccttctacgagcggctcggcttcaccgtcaccgccgacgtcgaggtgcccgaaggaccgcgcacctggtgcatgacccgcaagcccggtgcctgacaactttattatacatagttgatggccggccgcttcgagcagacatgataagatacattgatgagtttggacaaaccacaactagaatgcagtgaaaaaaatgctttatttgtgaaatttgtgatgctattgctttatttgtaaccattataagctgcaataaacaagttaacaacaacaattgcattcattttatgtttcaggttcagggggaggtgtgggaggttttttaaagcaagtaaaacctctacaaatgtggtagcggccgcggcgctcttccgcttcctcgctcactgactcgctgcgctcggtcgttcggctgcggcgagcggtatcagctcactcaaaggcggtaatacggttatccacagaatcaggggataacgcaggaaagaacatgtgagcaaaaggccagcaaaaggccaggaaccgtaaaaaggccgcgttgctggcgtttttccataggctccgcccccctgacgagcatcacaaaaatcgacgctcaagtcagaggtggcgaaacccgacaggactataaagataccaggcgtttccccctggaagctccctcgtgcgctctcctgttccgaccctgccgcttaccggatacctgtccgcctttctctcttcgggaagcgtggcgctttctcatagctcacgctgtaggtatctcagttcggtgtaggtcgttcgctccaagctgggctgtgtgcacgaaccccccgttcagcccgaccgctgcgccttatccggtaactatcgtcttgagtccaacccggtaagacacgacttatcgccactggcagcagccactggtaacaggattagcagagcgaggtatgtaggcggtgctacagagttcttgaagtggtggcctaactacggctacactagaagaacagtatttggtatctgcgctctgctgaagccagttaccttcggaaaaagagttggtagctcttgatccggcaaacaaaccaccgctggtagcggtggtttttttgtttgcaagcagcagattacgcgcagaaaaaaaggatctcaagaagatcctttgatcttttctacggggtctgacgctcagtggaacgaaaactcacgttaagggattttggtcatgagattatcaaaaaggatcttcacctagatccttttaaattaaaaatgaagttttaaatcaatctaaagtatatatgagtaaacttggtctgacagttaccaatgcttaatcagtgaggcacctatctcagcgatctgtctatttcgttcatccatagttgcctgactccccgtcgtgtagataactacgatacgggagggcttaccatctggccccagtgctgcaatgataccgcgagacccacgctcaccggctccagatttatcagcaataaaccagccagccggaagggccgagcgcagaagtggtcctgcaactttatccgcctccatccagtctattaattgttgccgggaagctagagtaagtagttcgccagttaatagtttgcgcaacgttgttgccattgctacaggcatcgtggtgtcacgctcgtcgtttggtatggcttcattcagctccggttcccaacgatcaaggcgagttacatgatcccccatgttgtgcaaaaaagcggttagctccttcggtcctccgatcgttgtcagaagtaagttggccgcagtgttatcactcatggttatggcagcactgcataattctcttactgtcatgccatccgtaagatgcttttctgtgactggtgagtactcaaccaagtcattctgagaatagtgtatgcggcgaccgagttgctcttgcccggcgtcaatacgggataataccgcgccacatagcagaactttaaaagtgctcatcattggaaaacgttcttcggggcgaaaactctcaaggatcttaccgctgttgagatccagttcgatgtaacccactcgtgcacccaactgatcttcagcatcttttactttcaccagcgtttctgggtgagcaaaaacaggaaggcaaaatgccgcaaaaaagggaataagggcgacacggaaatgttgaatactcatactcttcctttttcaatattattgaagcatttatcagggttattgtctcatgagcggatacatatttgaatgtatttagaaaaataaacaaataggggttccgcgcacatttccccgaaaagtgccacctgacgtctaagaaaccattattatcatgacattaacctataaaaataggcgtatcacgaggccctttcgtcggcgcgccgcggccgc

SEQ ID NO: 696 - DNA, 4624 bp, synthetic construct
  source 1..4624: mol_type = other DNA
caactttgtatagaaaagttggagggcctatttcccatgattccttcatatttgcatatacgatacaaggctgttagagagataattggaattaatttgactgtaaacacaaagatattagtacaaaatacgtgacgtagaaagtaataatttcttgggtagtttgcagttttaaaattatgttttaaaatggactatcatatgcttaccgtaacttgaaagtatttcgatttcttggctttatatatcttgtggaaaggacgaaacaccgtgcacacctcctggcgggcagctctgctgctgctgaagcagctgctgtgttctggcaatacctgcagcagcagcaacagcagcagcagggaggcctgccctgactgcccactttttgtttttcaagtttgtacaaaaaagcaggctgggttgcgccttttccaaggcagccctgggtttgcgcagggacgcggctgctctgggcgtggttccgggaaacgcagcggcgccgaccctgggtctcgcacattcttcacgtccgttcgcagcgtcacccggatcttcgccgctacccttgtgggccccccggcgacgcttcctgctccgcccctaagtcgggaaggttccttgcggttcgcggcgtgccggacgtgacaaacggaagccgcacgtctcactagtaccctcgcagacggacagcgccagggagcaatggcagcgcgccgaccgcgatgggctgtggccaatagcggctgctcagcagggcgcgccgagagcagcggccgggaaggggcggtgcgggaggcggggtgtggggcggtagtgtgggccctgttcctgcccgcgcggtgttccgcattctgcaagcctccggagcgcacgtcggcagtcggctccctcgttgaccgaatcaccgacctctctccccaggacccagctttcttgtacaaagtgggccaccatggtgagcaagggcgaggagctgttcaccggggtggtgcccatcctggtcgagctggacggcgacgtaaacggccacaagttcagcgtgtccggcgagggcgagggcgatgccacctacggcaagctgaccctgaagttcatctgcaccaccggcaagctgcccgtgccctggcccaccctcgtgaccaccctgacctacggcgtgcagtgcttcagccgctaccccgaccacatgaagcagcacgacttcttcaagtccgccatgcccgaaggctacgtccaggagcgcaccatcttcttcaaggacgacggcaactacaagacccgcgccgaggtgaagttcgagggcgacaccctggtgaaccgcatcgagctgaagggcatcgacttcaaggaggacggcaacatcctggggcacaagctggagtacaactacaacagccacaacgtctatatcatggccgacaagcagaagaacggcatcaaggtgaacttcaagatccgccacaacatcgaggacggcagcgtgcagctcgccgaccactaccagcagaacacccccatcggcgacggccccgtgctgctgcccgacaaccactacctgagcacccagtccgccctgagcaaagaccccaacgagaagcgcgatcacatggtcctgctggagttcgtgaccgccgccgggatcactctcggcatggacgagctgtacaagggaagcggagagggcaggggaagtcttctaacatgcggggacgtggaggaaaatcccggccccatgaccgagtacaagcccacggtgcgcctcgccacccgcgacgacgtccccagggccgtacgcaccctcgccgccgcgttcgccgactaccccgccacgcgccacaccgtcgatccggaccgccacatcgagcgggtcaccgagctgcaagaactcttcctcacgcgcgtcgggctcgacatcggcaaggtgtgggtcgcggacgacggcgccgcggtggcggtctggaccacgccggagagcgtcgaagcgggggcggtgttcgccgagatcggcccgcgcatggccgagttgagcggttcccggctggccgcgcagcaacagatggaaggcctcctggcgccgcaccggcccaaggagcccgcgtggttcctggccaccgtcggcgtctcgcccgaccaccagggcaagggtctgggcagcgccgtcgtgctccccggagtggaggcggccgagcgcgccggggtgcccgccttcctggagacctccgcgccccgcaacctccccttctacgagcggctcggcttcaccgtcaccgccgacgtcgaggtgcccgaaggaccgcgcacctggtgcatgacccgcaagcccggtgcctgacaactttattatacatagttgatggccggccgcttcgagcagacatgataagatacattgatgagtttggacaaaccacaactagaatgcagtgaaaaaaatgctttatttgtgaaatttgtgatgctattgctttatttgtaaccattataagctgcaataaacaagttaacaacaacaattgcattcattttatgtttcaggttcagggggaggtgtgggaggttttttaaagcaagtaaaacctctacaaatgtggtagcggccgcggcgctcttccgcttcctcgctcactgactcgctgcgctcggtcgttcggctgcggcgagcggtatcagctcactcaaaggcggtaatacggttatccacagaatcaggggataacgcaggaaagaacatgtgagcaaaaggccagcaaaaggccaggaaccgtaaaaaggccgcgttgctggcgtttttccataggctccgcccccctgacgagcatcacaaaaatcgacgctcaagtcagaggtggcgaaacccgacaggactataaagataccaggcgtttccccctggaagctccctcgtgcgctctcctgttccgaccctgccgcttaccggatacctgtccgcctttctctcttcgggaagcgtggcgctttctcatagctcacgctgtaggtatctcagttcggtgtaggtcgttcgctccaagctgggctgtgtgcacgaaccccccgttcagcccgaccgctgcgccttatccggtaactatcgtcttgagtccaacccggtaagacacgacttatcgccactggcagcagccactggtaacaggattagcagagcgaggtatgtaggcggtgctacagagttcttgaagtggtggcctaactacggctacactagaagaacagtatttggtatctgcgctctgctgaagccagttaccttcggaaaaagagttggtagctcttgatccggcaaacaaaccaccgctggtagcggtggtttttttgtttgcaagcagcagattacgcgcagaaaaaaaggatctcaagaagatcctttgatcttttctacggggtctgacgctcagtggaacgaaaactcacgttaagggattttggtcatgagattatcaaaaaggatcttcacctagatccttttaaattaaaaatgaagttttaaatcaatctaaagtatatatgagtaaacttggtctgacagttaccaatgcttaatcagtgaggcacctatctcagcgatctgtctatttcgttcatccatagttgcctgactccccgtcgtgtagataactacgatacgggagggcttaccatctggccccagtgctgcaatgataccgcgagacccacgctcaccggctccagatttatcagcaataaaccagccagccggaagggccgagcgcagaagtggtcctgcaactttatccgcctccatccagtctattaattgttgccgggaagctagagtaagtagttcgccagttaatagtttgcgcaacgttgttgccattgctacaggcatcgtggtgtcacgctcgtcgtttggtatggcttcattcagctccggttcccaacgatcaaggcgagttacatgatcccccatgttgtgcaaaaaagcggttagctccttcggtcctccgatcgttgtcagaagtaagttggccgcagtgttatcactcatggttatggcagcactgcataattctcttactgtcatgccatccgtaagatgcttttctgtgactggtgagtactcaaccaagtcattctgagaatagtgtatgcggcgaccgagttgctcttgcccggcgtcaatacgggataataccgcgccacatagcagaactttaaaagtgctcatcattggaaaacgttcttcggggcgaaaactctcaaggatcttaccgctgttgagatccagttcgatgtaacccactcgtgcacccaactgatcttcagcatcttttactttcaccagcgtttctgggtgagcaaaaacaggaaggcaaaatgccgcaaaaaagggaataagggcgacacggaaatgttgaatactcatactcttcctttttcaatattattgaagcatttatcagggttattgtctcatgagcggatacatatttgaatgtatttagaaaaataaacaaataggggttccgcgcacatttccccgaaaagtgccacctgacgtctaagaaaccattattatcatgacattaacctataaaaataggcgtatcacgaggccctttcgtcggcgcgccgcggccgc

SEQ ID NO: 697 - DNA, 4624 bp, synthetic construct
  source 1..4624: mol_type = other DNA
caactttgtatagaaaagttggagggcctatttcccatgattccttcatatttgcatatacgatacaaggctgttagagagataattggaattaatttgactgtaaacacaaagatattagtacaaaatacgtgacgtagaaagtaataatttcttgggtagtttgcagttttaaaattatgttttaaaatggactatcatatgcttaccgtaacttgaaagtatttcgatttcttggctttatatatcttgtggaaaggacgaaacaccgtgcacacctcctggcgggcagctctgctgctgctgaagctactgctgtgttctggcaatacctgcagcagaagcaacagcagcagcagggaggcctgccctgactgcccactttttgtttttcaagtttgtacaaaaaagcaggctgggttgcgccttttccaaggcagccctgggtttgcgcagggacgcggctgctctgggcgtggttccgggaaacgcagcggcgccgaccctgggtctcgcacattcttcacgtccgttcgcagcgtcacccggatcttcgccgctacccttgtgggccccccggcgacgcttcctgctccgcccctaagtcgggaaggttccttgcggttcgcggcgtgccggacgtgacaaacggaagccgcacgtctcactagtaccctcgcagacggacagcgccagggagcaatggcagcgcgccgaccgcgatgggctgtggccaatagcggctgctcagcagggcgcgccgagagcagcggccgggaaggggcggtgcgggaggcggggtgtggggcggtagtgtgggccctgttcctgcccgcgcggtgttccgcattctgcaagcctccggagcgcacgtcggcagtcggctccctcgttgaccgaatcaccgacctctctccccaggacccagctttcttgtacaaagtgggccaccatggtgagcaagggcgaggagctgttcaccggggtggtgcccatcctggtcgagctggacggcgacgtaaacggccacaagttcagcgtgtccggcgagggcgagggcgatgccacctacggcaagctgaccctgaagttcatctgcaccaccggcaagctgcccgtgccctggcccaccctcgtgaccaccctgacctacggcgtgcagtgcttcagccgctaccccgaccacatgaagcagcacgacttcttcaagtccgccatgcccgaaggctacgtccaggagcgcaccatcttcttcaaggacgacggcaactacaagacccgcgccgaggtgaagttcgagggcgacaccctggtgaaccgcatcgagctgaagggcatcgacttcaaggaggacggcaacatcctggggcacaagctggagtacaactacaacagccacaacgtctatatcatggccgacaagcagaagaacggcatcaaggtgaacttcaagatccgccacaacatcgaggacggcagcgtgcagctcgccgaccactaccagcagaacacccccatcggcgacggccccgtgctgctgcccgacaaccactacctgagcacccagtccgccctgagcaaagaccccaacgagaagcgcgatcacatggtcctgctggagttcgtgaccgccgccgggatcactctcggcatggacgagctgtacaagggaagcggagagggcaggggaagtcttctaacatgcggggacgtggaggaaaatcccggccccatgaccgagtacaagcccacggtgcgcctcgccacccgcgacgacgtccccagggccgtacgcaccctcgccgccgcgttcgccgactaccccgccacgcgccacaccgtcgatccggaccgccacatcgagcgggtcaccgagctgcaagaactcttcctcacgcgcgtcgggctcgacatcggcaaggtgtgggtcgcggacgacggcgccgcggtggcggtctggaccacgccggagagcgtcgaagcgggggcggtgttcgccgagatcggcccgcgcatggccgagttgagcggttcccggctggccgcgcagcaacagatggaaggcctcctggcgccgcaccggcccaaggagcccgcgtggttcctggccaccgtcggcgtctcgcccgaccaccagggcaagggtctgggcagcgccgtcgtgctccccggagtggaggcggccgagcgcgccggggtgcccgccttcctggagacctccgcgccccgcaacctccccttctacgagcggctcggcttcaccgtcaccgccgacgtcgaggtgcccgaaggaccgcgcacctggtgcatgacccgcaagcccggtgcctgacaactttattatacatagttgatggccggccgcttcgagcagacatgataagatacattgatgagtttggacaaaccacaactagaatgcagtgaaaaaaatgctttatttgtgaaatttgtgatgctattgctttatttgtaaccattataagctgcaataaacaagttaacaacaacaattgcattcattttatgtttcaggttcagggggaggtgtgggaggttttttaaagcaagtaaaacctctacaaatgtggtagcggccgcggcgctcttccgcttcctcgctcactgactcgctgcgctcggtcgttcggctgcggcgagcggtatcagctcactcaaaggcggtaatacggttatccacagaatcaggggataacgcaggaaagaacatgtgagcaaaaggccagcaaaaggccaggaaccgtaaaaaggccgcgttgctggcgtttttccataggctccgcccccctgacgagcatcacaaaaatcgacgctcaagtcagaggtggcgaaacccgacaggactataaagataccaggcgtttccccctggaagctccctcgtgcgctctcctgttccgaccctgccgcttaccggatacctgtccgcctttctctcttcgggaagcgtggcgctttctcatagctcacgctgtaggtatctcagttcggtgtaggtcgttcgctccaagctgggctgtgtgcacgaaccccccgttcagcccgaccgctgcgccttatccggtaactatcgtcttgagtccaacccggtaagacacgacttatcgccactggcagcagccactggtaacaggattagcagagcgaggtatgtaggcggtgctacagagttcttgaagtggtggcctaactacggctacactagaagaacagtatttggtatctgcgctctgctgaagccagttaccttcggaaaaagagttggtagctcttgatccggcaaacaaaccaccgctggtagcggtggtttttttgtttgcaagcagcagattacgcgcagaaaaaaaggatctcaagaagatcctttgatcttttctacggggtctgacgctcagtggaacgaaaactcacgttaagggattttggtcatgagattatcaaaaaggatcttcacctagatccttttaaattaaaaatgaagttttaaatcaatctaaagtatatatgagtaaacttggtctgacagttaccaatgcttaatcagtgaggcacctatctcagcgatctgtctatttcgttcatccatagttgcctgactccccgtcgtgtagataactacgatacgggagggcttaccatctggccccagtgctgcaatgataccgcgagacccacgctcaccggctccagatttatcagcaataaaccagccagccggaagggccgagcgcagaagtggtcctgcaactttatccgcctccatccagtctattaattgttgccgggaagctagagtaagtagttcgccagttaatagtttgcgcaacgttgttgccattgctacaggcatcgtggtgtcacgctcgtcgtttggtatggcttcattcagctccggttcccaacgatcaaggcgagttacatgatcccccatgttgtgcaaaaaagcggttagctccttcggtcctccgatcgttgtcagaagtaagttggccgcagtgttatcactcatggttatggcagcactgcataattctcttactgtcatgccatccgtaagatgcttttctgtgactggtgagtactcaaccaagtcattctgagaatagtgtatgcggcgaccgagttgctcttgcccggcgtcaatacgggataataccgcgccacatagcagaactttaaaagtgctcatcattggaaaacgttcttcggggcgaaaactctcaaggatcttaccgctgttgagatccagttcgatgtaacccactcgtgcacccaactgatcttcagcatcttttactttcaccagcgtttctgggtgagcaaaaacaggaaggcaaaatgccgcaaaaaagggaataagggcgacacggaaatgttgaatactcatactcttcctttttcaatattattgaagcatttatcagggttattgtctcatgagcggatacatatttgaatgtatttagaaaaataaacaaataggggttccgcgcacatttccccgaaaagtgccacctgacgtctaagaaaccattattatcatgacattaacctataaaaataggcgtatcacgaggccctttcgtcggcgcgccgcggccgc

SEQ ID NO: 698 - DNA, 4624 bp, synthetic construct
  source 1..4624: mol_type = other DNA
caactttgtatagaaaagttggagggcctatttcccatgattccttcatatttgcatatacgatacaaggctgttagagagataattggaattaatttgactgtaaacacaaagatattagtacaaaatacgtgacgtagaaagtaataatttcttgggtagtttgcagttttaaaattatgttttaaaatggactatcatatgcttaccgtaacttgaaagtatttcgatttcttggctttatatatcttgtggaaaggacgaaacaccgtgcacacctcctggcgggcagctctgctgctgctaatgctgatgctgtgttctggcaatacctgcagcaacagcaaaagcagcagcagggaggcctgccctgactgcccactttttgtttttcaagtttgtacaaaaaagcaggctgggttgcgccttttccaaggcagccctgggtttgcgcagggacgcggctgctctgggcgtggttccgggaaacgcagcggcgccgaccctgggtctcgcacattcttcacgtccgttcgcagcgtcacccggatcttcgccgctacccttgtgggccccccggcgacgcttcctgctccgcccctaagtcgggaaggttccttgcggttcgcggcgtgccggacgtgacaaacggaagccgcacgtctcactagtaccctcgcagacggacagcgccagggagcaatggcagcgcgccgaccgcgatgggctgtggccaatagcggctgctcagcagggcgcgccgagagcagcggccgggaaggggcggtgcgggaggcggggtgtggggcggtagtgtgggccctgttcctgcccgcgcggtgttccgcattctgcaagcctccggagcgcacgtcggcagtcggctccctcgttgaccgaatcaccgacctctctccccaggacccagctttcttgtacaaagtgggccaccatggtgagcaagggcgaggagctgttcaccggggtggtgcccatcctggtcgagctggacggcgacgtaaacggccacaagttcagcgtgtccggcgagggcgagggcgatgccacctacggcaagctgaccctgaagttcatctgcaccaccggcaagctgcccgtgccctggcccaccctcgtgaccaccctgacctacggcgtgcagtgcttcagccgctaccccgaccacatgaagcagcacgacttcttcaagtccgccatgcccgaaggctacgtccaggagcgcaccatcttcttcaaggacgacggcaactacaagacccgcgccgaggtgaagttcgagggcgacaccctggtgaaccgcatcgagctgaagggcatcgacttcaaggaggacggcaacatcctggggcacaagctggagtacaactacaacagccacaacgtctatatcatggccgacaagcagaagaacggcatcaaggtgaacttcaagatccgccacaacatcgaggacggcagcgtgcagctcgccgaccactaccagcagaacacccccatcggcgacggccccgtgctgctgcccgacaaccactacctgagcacccagtccgccctgagcaaagaccccaacgagaagcgcgatcacatggtcctgctggagttcgtgaccgccgccgggatcactctcggcatggacgagctgtacaagggaagcggagagggcaggggaagtcttctaacatgcggggacgtggaggaaaatcccggccccatgaccgagtacaagcccacggtgcgcctcgccacccgcgacgacgtccccagggccgtacgcaccctcgccgccgcgttcgccgactaccccgccacgcgccacaccgtcgatccggaccgccacatcgagcgggtcaccgagctgcaagaactcttcctcacgcgcgtcgggctcgacatcggcaaggtgtgggtcgcggacgacggcgccgcggtggcggtctggaccacgccggagagcgtcgaagcgggggcggtgttcgccgagatcggcccgcgcatggccgagttgagcggttcccggctggccgcgcagcaacagatggaaggcctcctggcgccgcaccggcccaaggagcccgcgtggttcctggccaccgtcggcgtctcgcccgaccaccagggcaagggtctgggcagcgccgtcgtgctccccggagtggaggcggccgagcgcgccggggtgcccgccttcctggagacctccgcgccccgcaacctccccttctacgagcggctcggcttcaccgtcaccgccgacgtcgaggtgcccgaaggaccgcgcacctggtgcatgacccgcaagcccggtgcctgacaactttattatacatagttgatggccggccgcttcgagcagacatgataagatacattgatgagtttggacaaaccacaactagaatgcagtgaaaaaaatgctttatttgtgaaatttgtgatgctattgctttatttgtaaccattataagctgcaataaacaagttaacaacaacaattgcattcattttatgtttcaggttcagggggaggtgtgggaggttttttaaagcaagtaaaacctctacaaatgtggtagcggccgcggcgctcttccgcttcctcgctcactgactcgctgcgctcggtcgttcggctgcggcgagcggtatcagctcactcaaaggcggtaatacggttatccacagaatcaggggataacgcaggaaagaacatgtgagcaaaaggccagcaaaaggccaggaaccgtaaaaaggccgcgttgctggcgtttttccataggctccgcccccctgacgagcatcacaaaaatcgacgctcaagtcagaggtggcgaaacccgacaggactataaagataccaggcgtttccccctggaagctccctcgtgcgctctcctgttccgaccctgccgcttaccggatacctgtccgcctttctctcttcgggaagcgtggcgctttctcatagctcacgctgtaggtatctcagttcggtgtaggtcgttcgctccaagctgggctgtgtgcacgaaccccccgttcagcccgaccgctgcgccttatccggtaactatcgtcttgagtccaacccggtaagacacgacttatcgccactggcagcagccactggtaacaggattagcagagcgaggtatgtaggcggtgctacagagttcttgaagtggtggcctaactacggctacactagaagaacagtatttggtatctgcgctctgctgaagccagttaccttcggaaaaagagttggtagctcttgatccggcaaacaaaccaccgctggtagcggtggtttttttgtttgcaagcagcagattacgcgcagaaaaaaaggatctcaagaagatcctttgatcttttctacggggtctgacgctcagtggaacgaaaactcacgttaagggattttggtcatgagattatcaaaaaggatcttcacctagatccttttaaattaaaaatgaagttttaaatcaatctaaagtatatatgagtaaacttggtctgacagttaccaatgcttaatcagtgaggcacctatctcagcgatctgtctatttcgttcatccatagttgcctgactccccgtcgtgtagataactacgatacgggagggcttaccatctggccccagtgctgcaatgataccgcgagacccacgctcaccggctccagatttatcagcaataaaccagccagccggaagggccgagcgcagaagtggtcctgcaactttatccgcctccatccagtctattaattgttgccgggaagctagagtaagtagttcgccagttaatagtttgcgcaacgttgttgccattgctacaggcatcgtggtgtcacgctcgtcgtttggtatggcttcattcagctccggttcccaacgatcaaggcgagttacatgatcccccatgttgtgcaaaaaagcggttagctccttcggtcctccgatcgttgtcagaagtaagttggccgcagtgttatcactcatggttatggcagcactgcataattctcttactgtcatgccatccgtaagatgcttttctgtgactggtgagtactcaaccaagtcattctgagaatagtgtatgcggcgaccgagttgctcttgcccggcgtcaatacgggataataccgcgccacatagcagaactttaaaagtgctcatcattggaaaacgttcttcggggcgaaaactctcaaggatcttaccgctgttgagatccagttcgatgtaacccactcgtgcacccaactgatcttcagcatcttttactttcaccagcgtttctgggtgagcaaaaacaggaaggcaaaatgccgcaaaaaagggaataagggcgacacggaaatgttgaatactcatactcttcctttttcaatattattgaagcatttatcagggttattgtctcatgagcggatacatatttgaatgtatttagaaaaataaacaaataggggttccgcgcacatttccccgaaaagtgccacctgacgtctaagaaaccattattatcatgacattaacctataaaaataggcgtatcacgaggccctttcgtcggcgcgccgcggccgc

SEQ ID NO: 699 - DNA, 4624 bp, synthetic construct
  source 1..4624: mol_type = other DNA
caactttgtatagaaaagttggagggcctatttcccatgattccttcatatttgcatatacgatacaaggctgttagagagataattggaattaatttgactgtaaacacaaagatattagtacaaaatacgtgacgtagaaagtaataatttcttgggtagtttgcagttttaaaattatgttttaaaatggactatcatatgcttaccgtaacttgaaagtatttcgatttcttggctttatatatcttgtggaaaggacgaaacaccgtgcacacctcctggcgggcagctctgctgctgctacaactgctgctgtgttctggcaatacctgcagcagcagaagaagcagcagcagggaggcctgccctgactgcccactttttgtttttcaagtttgtacaaaaaagcaggctgggttgcgccttttccaaggcagccctgggtttgcgcagggacgcggctgctctgggcgtggttccgggaaacgcagcggcgccgaccctgggtctcgcacattcttcacgtccgttcgcagcgtcacccggatcttcgccgctacccttgtgggccccccggcgacgcttcctgctccgcccctaagtcgggaaggttccttgcggttcgcggcgtgccggacgtgacaaacggaagccgcacgtctcactagtaccctcgcagacggacagcgccagggagcaatggcagcgcgccgaccgcgatgggctgtggccaatagcggctgctcagcagggcgcgccgagagcagcggccgggaaggggcggtgcgggaggcggggtgtggggcggtagtgtgggccctgttcctgcccgcgcggtgttccgcattctgcaagcctccggagcgcacgtcggcagtcggctccctcgttgaccgaatcaccgacctctctccccaggacccagctttcttgtacaaagtgggccaccatggtgagcaagggcgaggagctgttcaccggggtggtgcccatcctggtcgagctggacggcgacgtaaacggccacaagttcagcgtgtccggcgagggcgagggcgatgccacctacggcaagctgaccctgaagttcatctgcaccaccggcaagctgcccgtgccctggcccaccctcgtgaccaccctgacctacggcgtgcagtgcttcagccgctaccccgaccacatgaagcagcacgacttcttcaagtccgccatgcccgaaggctacgtccaggagcgcaccatcttcttcaaggacgacggcaactacaagacccgcgccgaggtgaagttcgagggcgacaccctggtgaaccgcatcgagctgaagggcatcgacttcaaggaggacggcaacatcctggggcacaagctggagtacaactacaacagccacaacgtctatatcatggccgacaagcagaagaacggcatcaaggtgaacttcaagatccgccacaacatcgaggacggcagcgtgcagctcgccgaccactaccagcagaacacccccatcggcgacggccccgtgctgctgcccgacaaccactacctgagcacccagtccgccctgagcaaagaccccaacgagaagcgcgatcacatggtcctgctggagttcgtgaccgccgccgggatcactctcggcatggacgagctgtacaagggaagcggagagggcaggggaagtcttctaacatgcggggacgtggaggaaaatcccggccccatgaccgagtacaagcccacggtgcgcctcgccacccgcgacgacgtccccagggccgtacgcaccctcgccgccgcgttcgccgactaccccgccacgcgccacaccgtcgatccggaccgccacatcgagcgggtcaccgagctgcaagaactcttcctcacgcgcgtcgggctcgacatcggcaaggtgtgggtcgcggacgacggcgccgcggtggcggtctggaccacgccggagagcgtcgaagcgggggcggtgttcgccgagatcggcccgcgcatggccgagttgagcggttcccggctggccgcgcagcaacagatggaaggcctcctggcgccgcaccggcccaaggagcccgcgtggttcctggccaccgtcggcgtctcgcccgaccaccagggcaagggtctgggcagcgccgtcgtgctccccggagtggaggcggccgagcgcgccggggtgcccgccttcctggagacctccgcgccccgcaacctccccttctacgagcggctcggcttcaccgtcaccgccgacgtcgaggtgcccgaaggaccgcgcacctggtgcatgacccgcaagcccggtgcctgacaactttattatacatagttgatggccggccgcttcgagcagacatgataagatacattgatgagtttggacaaaccacaactagaatgcagtgaaaaaaatgctttatttgtgaaatttgtgatgctattgctttatttgtaaccattataagctgcaataaacaagttaacaacaacaattgcattcattttatgtttcaggttcagggggaggtgtgggaggttttttaaagcaagtaaaacctctacaaatgtggtagcggccgcggcgctcttccgcttcctcgctcactgactcgctgcgctcggtcgttcggctgcggcgagcggtatcagctcactcaaaggcggtaatacggttatccacagaatcaggggataacgcaggaaagaacatgtgagcaaaaggccagcaaaaggccaggaaccgtaaaaaggccgcgttgctggcgtttttccataggctccgcccccctgacgagcatcacaaaaatcgacgctcaagtcagaggtggcgaaacccgacaggactataaagataccaggcgtttccccctggaagctccctcgtgcgctctcctgttccgaccctgccgcttaccggatacctgtccgcctttctctcttcgggaagcgtggcgctttctcatagctcacgctgtaggtatctcagttcggtgtaggtcgttcgctccaagctgggctgtgtgcacgaaccccccgttcagcccgaccgctgcgccttatccggtaactatcgtcttgagtccaacccggtaagacacgacttatcgccactggcagcagccactggtaacaggattagcagagcgaggtatgtaggcggtgctacagagttcttgaagtggtggcctaactacggctacactagaagaacagtatttggtatctgcgctctgctgaagccagttaccttcggaaaaagagttggtagctcttgatccggcaaacaaaccaccgctggtagcggtggtttttttgtttgcaagcagcagattacgcgcagaaaaaaaggatctcaagaagatcctttgatcttttctacggggtctgacgctcagtggaacgaaaactcacgttaagggattttggtcatgagattatcaaaaaggatcttcacctagatccttttaaattaaaaatgaagttttaaatcaatctaaagtatatatgagtaaacttggtctgacagttaccaatgcttaatcagtgaggcacctatctcagcgatctgtctatttcgttcatccatagttgcctgactccccgtcgtgtagataactacgatacgggagggcttaccatctggccccagtgctgcaatgataccgcgagacccacgctcaccggctccagatttatcagcaataaaccagccagccggaagggccgagcgcagaagtggtcctgcaactttatccgcctccatccagtctattaattgttgccgggaagctagagtaagtagttcgccagttaatagtttgcgcaacgttgttgccattgctacaggcatcgtggtgtcacgctcgtcgtttggtatggcttcattcagctccggttcccaacgatcaaggcgagttacatgatcccccatgttgtgcaaaaaagcggttagctccttcggtcctccgatcgttgtcagaagtaagttggccgcagtgttatcactcatggttatggcagcactgcataattctcttactgtcatgccatccgtaagatgcttttctgtgactggtgagtactcaaccaagtcattctgagaatagtgtatgcggcgaccgagttgctcttgcccggcgtcaatacgggataataccgcgccacatagcagaactttaaaagtgctcatcattggaaaacgttcttcggggcgaaaactctcaaggatcttaccgctgttgagatccagttcgatgtaacccactcgtgcacccaactgatcttcagcatcttttactttcaccagcgtttctgggtgagcaaaaacaggaaggcaaaatgccgcaaaaaagggaataagggcgacacggaaatgttgaatactcatactcttcctttttcaatattattgaagcatttatcagggttattgtctcatgagcggatacatatttgaatgtatttagaaaaataaacaaataggggttccgcgcacatttccccgaaaagtgccacctgacgtctaagaaaccattattatcatgacattaacctataaaaataggcgtatcacgaggccctttcgtcggcgcgccgcggccgc

SEQ ID NO: 700 - DNA, 4624 bp, synthetic construct
  source 1..4624: mol_type = other DNA
caactttgtatagaaaagttggagggcctatttcccatgattccttcatatttgcatatacgatacaaggctgttagagagataattggaattaatttgactgtaaacacaaagatattagtacaaaatacgtgacgtagaaagtaataatttcttgggtagtttgcagttttaaaattatgttttaaaatggactatcatatgcttaccgtaacttgaaagtatttcgatttcttggctttatatatcttgtggaaaggacgaaacaccgtgcacacctcctggcgggcagctctgctgctgctacagctactgctgtgttctggcaatacctgcagcagaagcagaagcagcagcagggaggcctgccctgactgcccactttttgtttttcaagtttgtacaaaaaagcaggctgggttgcgccttttccaaggcagccctgggtttgcgcagggacgcggctgctctgggcgtggttccgggaaacgcagcggcgccgaccctgggtctcgcacattcttcacgtccgttcgcagcgtcacccggatcttcgccgctacccttgtgggccccccggcgacgcttcctgctccgcccctaagtcgggaaggttccttgcggttcgcggcgtgccggacgtgacaaacggaagccgcacgtctcactagtaccctcgcagacggacagcgccagggagcaatggcagcgcgccgaccgcgatgggctgtggccaatagcggctgctcagcagggcgcgccgagagcagcggccgggaaggggcggtgcgggaggcggggtgtggggcggtagtgtgggccctgttcctgcccgcgcggtgttccgcattctgcaagcctccggagcgcacgtcggcagtcggctccctcgttgaccgaatcaccgacctctctccccaggacccagctttcttgtacaaagtgggccaccatggtgagcaagggcgaggagctgttcaccggggtggtgcccatcctggtcgagctggacggcgacgtaaacggccacaagttcagcgtgtccggcgagggcgagggcgatgccacctacggcaagctgaccctgaagttcatctgcaccaccggcaagctgcccgtgccctggcccaccctcgtgaccaccctgacctacggcgtgcagtgcttcagccgctaccccgaccacatgaagcagcacgacttcttcaagtccgccatgcccgaaggctacgtccaggagcgcaccatcttcttcaaggacgacggcaactacaagacccgcgccgaggtgaagttcgagggcgacaccctggtgaaccgcatcgagctgaagggcatcgacttcaaggaggacggcaacatcctggggcacaagctggagtacaactacaacagccacaacgtctatatcatggccgacaagcagaagaacggcatcaaggtgaacttcaagatccgccacaacatcgaggacggcagcgtgcagctcgccgaccactaccagcagaacacccccatcggcgacggccccgtgctgctgcccgacaaccactacctgagcacccagtccgccctgagcaaagaccccaacgagaagcgcgatcacatggtcctgctggagttcgtgaccgccgccgggatcactctcggcatggacgagctgtacaagggaagcggagagggcaggggaagtcttctaacatgcggggacgtggaggaaaatcccggccccatgaccgagtacaagcccacggtgcgcctcgccacccgcgacgacgtccccagggccgtacgcaccctcgccgccgcgttcgccgactaccccgccacgcgccacaccgtcgatccggaccgccacatcgagcgggtcaccgagctgcaagaactcttcctcacgcgcgtcgggctcgacatcggcaaggtgtgggtcgcggacgacggcgccgcggtggcggtctggaccacgccggagagcgtcgaagcgggggcggtgttcgccgagatcggcccgcgcatggccgagttgagcggttcccggctggccgcgcagcaacagatggaaggcctcctggcgccgcaccggcccaaggagcccgcgtggttcctggccaccgtcggcgtctcgcccgaccaccagggcaagggtctgggcagcgccgtcgtgctccccggagtggaggcggccgagcgcgccggggtgcccgccttcctggagacctccgcgccccgcaacctccccttctacgagcggctcggcttcaccgtcaccgccgacgtcgaggtgcccgaaggaccgcgcacctggtgcatgacccgcaagcccggtgcctgacaactttattatacatagttgatggccggccgcttcgagcagacatgataagatacattgatgagtttggacaaaccacaactagaatgcagtgaaaaaaatgctttatttgtgaaatttgtgatgctattgctttatttgtaaccattataagctgcaataaacaagttaacaacaacaattgcattcattttatgtttcaggttcagggggaggtgtgggaggttttttaaagcaagtaaaacctctacaaatgtggtagcggccgcggcgctcttccgcttcctcgctcactgactcgctgcgctcggtcgttcggctgcggcgagcggtatcagctcactcaaaggcggtaatacggttatccacagaatcaggggataacgcaggaaagaacatgtgagcaaaaggccagcaaaaggccaggaaccgtaaaaaggccgcgttgctggcgtttttccataggctccgcccccctgacgagcatcacaaaaatcgacgctcaagtcagaggtggcgaaacccgacaggactataaagataccaggcgtttccccctggaagctccctcgtgcgctctcctgttccgaccctgccgcttaccggatacctgtccgcctttctctcttcgggaagcgtggcgctttctcatagctcacgctgtaggtatctcagttcggtgtaggtcgttcgctccaagctgggctgtgtgcacgaaccccccgttcagcccgaccgctgcgccttatccggtaactatcgtcttgagtccaacccggtaagacacgacttatcgccactggcagcagccactggtaacaggattagcagagcgaggtatgtaggcggtgctacagagttcttgaagtggtggcctaactacggctacactagaagaacagtatttggtatctgcgctctgctgaagccagttaccttcggaaaaagagttggtagctcttgatccggcaaacaaaccaccgctggtagcggtggtttttttgtttgcaagcagcagattacgcgcagaaaaaaaggatctcaagaagatcctttgatcttttctacggggtctgacgctcagtggaacgaaaactcacgttaagggattttggtcatgagattatcaaaaaggatcttcacctagatccttttaaattaaaaatgaagttttaaatcaatctaaagtatatatgagtaaacttggtctgacagttaccaatgcttaatcagtgaggcacctatctcagcgatctgtctatttcgttcatccatagttgcctgactccccgtcgtgtagataactacgatacgggagggcttaccatctggccccagtgctgcaatgataccgcgagacccacgctcaccggctccagatttatcagcaataaaccagccagccggaagggccgagcgcagaagtggtcctgcaactttatccgcctccatccagtctattaattgttgccgggaagctagagtaagtagttcgccagttaatagtttgcgcaacgttgttgccattgctacaggcatcgtggtgtcacgctcgtcgtttggtatggcttcattcagctccggttcccaacgatcaaggcgagttacatgatcccccatgttgtgcaaaaaagcggttagctccttcggtcctccgatcgttgtcagaagtaagttggccgcagtgttatcactcatggttatggcagcactgcataattctcttactgtcatgccatccgtaagatgcttttctgtgactggtgagtactcaaccaagtcattctgagaatagtgtatgcggcgaccgagttgctcttgcccggcgtcaatacgggataataccgcgccacatagcagaactttaaaagtgctcatcattggaaaacgttcttcggggcgaaaactctcaaggatcttaccgctgttgagatccagttcgatgtaacccactcgtgcacccaactgatcttcagcatcttttactttcaccagcgtttctgggtgagcaaaaacaggaaggcaaaatgccgcaaaaaagggaataagggcgacacggaaatgttgaatactcatactcttcctttttcaatattattgaagcatttatcagggttattgtctcatgagcggatacatatttgaatgtatttagaaaaataaacaaataggggttccgcgcacatttccccgaaaagtgccacctgacgtctaagaaaccattattatcatgacattaacctataaaaataggcgtatcacgaggccctttcgtcggcgcgccgcggccgc

SEQ ID NO: 701 - DNA, 4624 bp, synthetic construct
  source 1..4624: mol_type = other DNA
caactttgtatagaaaagttggagggcctatttcccatgattccttcatatttgcatatacgatacaaggctgttagagagataattggaattaatttgactgtaaacacaaagatattagtacaaaatacgtgacgtagaaagtaataatttcttgggtagtttgcagttttaaaattatgttttaaaatggactatcatatgcttaccgtaacttgaaagtatttcgatttcttggctttatatatcttgtggaaaggacgaaacaccgtgcacacctcctggcgggcagctctgctgctgctgaaactgctgctgtgttctggcaatacctgcagcagcagaaacagcagcagcagggaggcctgccctgactgcccactttttgtttttcaagtttgtacaaaaaagcaggctgggttgcgccttttccaaggcagccctgggtttgcgcagggacgcggctgctctgggcgtggttccgggaaacgcagcggcgccgaccctgggtctcgcacattcttcacgtccgttcgcagcgtcacccggatcttcgccgctacccttgtgggccccccggcgacgcttcctgctccgcccctaagtcgggaaggttccttgcggttcgcggcgtgccggacgtgacaaacggaagccgcacgtctcactagtaccctcgcagacggacagcgccagggagcaatggcagcgcgccgaccgcgatgggctgtggccaatagcggctgctcagcagggcgcgccgagagcagcggccgggaaggggcggtgcgggaggcggggtgtggggcggtagtgtgggccctgttcctgcccgcgcggtgttccgcattctgcaagcctccggagcgcacgtcggcagtcggctccctcgttgaccgaatcaccgacctctctccccaggacccagctttcttgtacaaagtgggccaccatggtgagcaagggcgaggagctgttcaccggggtggtgcccatcctggtcgagctggacggcgacgtaaacggccacaagttcagcgtgtccggcgagggcgagggcgatgccacctacggcaagctgaccctgaagttcatctgcaccaccggcaagctgcccgtgccctggcccaccctcgtgaccaccctgacctacggcgtgcagtgcttcagccgctaccccgaccacatgaagcagcacgacttcttcaagtccgccatgcccgaaggctacgtccaggagcgcaccatcttcttcaaggacgacggcaactacaagacccgcgccgaggtgaagttcgagggcgacaccctggtgaaccgcatcgagctgaagggcatcgacttcaaggaggacggcaacatcctggggcacaagctggagtacaactacaacagccacaacgtctatatcatggccgacaagcagaagaacggcatcaaggtgaacttcaagatccgccacaacatcgaggacggcagcgtgcagctcgccgaccactaccagcagaacacccccatcggcgacggccccgtgctgctgcccgacaaccactacctgagcacccagtccgccctgagcaaagaccccaacgagaagcgcgatcacatggtcctgctggagttcgtgaccgccgccgggatcactctcggcatggacgagctgtacaagggaagcggagagggcaggggaagtcttctaacatgcggggacgtggaggaaaatcccggccccatgaccgagtacaagcccacggtgcgcctcgccacccgcgacgacgtccccagggccgtacgcaccctcgccgccgcgttcgccgactaccccgccacgcgccacaccgtcgatccggaccgccacatcgagcgggtcaccgagctgcaagaactcttcctcacgcgcgtcgggctcgacatcggcaaggtgtgggtcgcggacgacggcgccgcggtggcggtctggaccacgccggagagcgtcgaagcgggggcggtgttcgccgagatcggcccgcgcatggccgagttgagcggttcccggctggccgcgcagcaacagatggaaggcctcctggcgccgcaccggcccaaggagcccgcgtggttcctggccaccgtcggcgtctcgcccgaccaccagggcaagggtctgggcagcgccgtcgtgctccccggagtggaggcggccgagcgcgccggggtgcccgccttcctggagacctccgcgccccgcaacctccccttctacgagcggctcggcttcaccgtcaccgccgacgtcgaggtgcccgaaggaccgcgcacctggtgcatgacccgcaagcccggtgcctgacaactttattatacatagttgatggccggccgcttcgagcagacatgataagatacattgatgagtttggacaaaccacaactagaatgcagtgaaaaaaatgctttatttgtgaaatttgtgatgctattgctttatttgtaaccattataagctgcaataaacaagttaacaacaacaattgcattcattttatgtttcaggttcagggggaggtgtgggaggttttttaaagcaagtaaaacctctacaaatgtggtagcggccgcggcgctcttccgcttcctcgctcactgactcgctgcgctcggtcgttcggctgcggcgagcggtatcagctcactcaaaggcggtaatacggttatccacagaatcaggggataacgcaggaaagaacatgtgagcaaaaggccagcaaaaggccaggaaccgtaaaaaggccgcgttgctggcgtttttccataggctccgcccccctgacgagcatcacaaaaatcgacgctcaagtcagaggtggcgaaacccgacaggactataaagataccaggcgtttccccctggaagctccctcgtgcgctctcctgttccgaccctgccgcttaccggatacctgtccgcctttctctcttcgggaagcgtggcgctttctcatagctcacgctgtaggtatctcagttcggtgtaggtcgttcgctccaagctgggctgtgtgcacgaaccccccgttcagcccgaccgctgcgccttatccggtaactatcgtcttgagtccaacccggtaagacacgacttatcgccactggcagcagccactggtaacaggattagcagagcgaggtatgtaggcggtgctacagagttcttgaagtggtggcctaactacggctacactagaagaacagtatttggtatctgcgctctgctgaagccagttaccttcggaaaaagagttggtagctcttgatccggcaaacaaaccaccgctggtagcggtggtttttttgtttgcaagcagcagattacgcgcagaaaaaaaggatctcaagaagatcctttgatcttttctacggggtctgacgctcagtggaacgaaaactcacgttaagggattttggtcatgagattatcaaaaaggatcttcacctagatccttttaaattaaaaatgaagttttaaatcaatctaaagtatatatgagtaaacttggtctgacagttaccaatgcttaatcagtgaggcacctatctcagcgatctgtctatttcgttcatccatagttgcctgactccccgtcgtgtagataactacgatacgggagggcttaccatctggccccagtgctgcaatgataccgcgagacccacgctcaccggctccagatttatcagcaataaaccagccagccggaagggccgagcgcagaagtggtcctgcaactttatccgcctccatccagtctattaattgttgccgggaagctagagtaagtagttcgccagttaatagtttgcgcaacgttgttgccattgctacaggcatcgtggtgtcacgctcgtcgtttggtatggcttcattcagctccggttcccaacgatcaaggcgagttacatgatcccccatgttgtgcaaaaaagcggttagctccttcggtcctccgatcgttgtcagaagtaagttggccgcagtgttatcactcatggttatggcagcactgcataattctcttactgtcatgccatccgtaagatgcttttctgtgactggtgagtactcaaccaagtcattctgagaatagtgtatgcggcgaccgagttgctcttgcccggcgtcaatacgggataataccgcgccacatagcagaactttaaaagtgctcatcattggaaaacgttcttcggggcgaaaactctcaaggatcttaccgctgttgagatccagttcgatgtaacccactcgtgcacccaactgatcttcagcatcttttactttcaccagcgtttctgggtgagcaaaaacaggaaggcaaaatgccgcaaaaaagggaataagggcgacacggaaatgttgaatactcatactcttcctttttcaatattattgaagcatttatcagggttattgtctcatgagcggatacatatttgaatgtatttagaaaaataaacaaataggggttccgcgcacatttccccgaaaagtgccacctgacgtctaagaaaccattattatcatgacattaacctataaaaataggcgtatcacgaggccctttcgtcggcgcgccgcggccgc

SEQ ID NO: 702 - DNA, 4624 bp, synthetic construct
  source 1..4624: mol_type = other DNA
caactttgtatagaaaagttggagggcctatttcccatgattccttcatatttgcatatacgatacaaggctgttagagagataattggaattaatttgactgtaaacacaaagatattagtacaaaatacgtgacgtagaaagtaataatttcttgggtagtttgcagttttaaaattatgttttaaaatggactatcatatgcttaccgtaacttgaaagtatttcgatttcttggctttatatatcttgtggaaaggacgaaacaccgtgcacacctcctggcgggcagctctgctgctgctgaagctgatgctgtgttctggcaatacctgcagcaacagcaacagcagcagcagggaggcctgccctgactgcccactttttgtttttcaagtttgtacaaaaaagcaggctgggttgcgccttttccaaggcagccctgggtttgcgcagggacgcggctgctctgggcgtggttccgggaaacgcagcggcgccgaccctgggtctcgcacattcttcacgtccgttcgcagcgtcacccggatcttcgccgctacccttgtgggccccccggcgacgcttcctgctccgcccctaagtcgggaaggttccttgcggttcgcggcgtgccggacgtgacaaacggaagccgcacgtctcactagtaccctcgcagacggacagcgccagggagcaatggcagcgcgccgaccgcgatgggctgtggccaatagcggctgctcagcagggcgcgccgagagcagcggccgggaaggggcggtgcgggaggcggggtgtggggcggtagtgtgggccctgttcctgcccgcgcggtgttccgcattctgcaagcctccggagcgcacgtcggcagtcggctccctcgttgaccgaatcaccgacctctctccccaggacccagctttcttgtacaaagtgggccaccatggtgagcaagggcgaggagctgttcaccggggtggtgcccatcctggtcgagctggacggcgacgtaaacggccacaagttcagcgtgtccggcgagggcgagggcgatgccacctacggcaagctgaccctgaagttcatctgcaccaccggcaagctgcccgtgccctggcccaccctcgtgaccaccctgacctacggcgtgcagtgcttcagccgctaccccgaccacatgaagcagcacgacttcttcaagtccgccatgcccgaaggctacgtccaggagcgcaccatcttcttcaaggacgacggcaactacaagacccgcgccgaggtgaagttcgagggcgacaccctggtgaaccgcatcgagctgaagggcatcgacttcaaggaggacggcaacatcctggggcacaagctggagtacaactacaacagccacaacgtctatatcatggccgacaagcagaagaacggcatcaaggtgaacttcaagatccgccacaacatcgaggacggcagcgtgcagctcgccgaccactaccagcagaacacccccatcggcgacggccccgtgctgctgcccgacaaccactacctgagcacccagtccgccctgagcaaagaccccaacgagaagcgcgatcacatggtcctgctggagttcgtgaccgccgccgggatcactctcggcatggacgagctgtacaagggaagcggagagggcaggggaagtcttctaacatgcggggacgtggaggaaaatcccggccccatgaccgagtacaagcccacggtgcgcctcgccacccgcgacgacgtccccagggccgtacgcaccctcgccgccgcgttcgccgactaccccgccacgcgccacaccgtcgatccggaccgccacatcgagcgggtcaccgagctgcaagaactcttcctcacgcgcgtcgggctcgacatcggcaaggtgtgggtcgcggacgacggcgccgcggtggcggtctggaccacgccggagagcgtcgaagcgggggcggtgttcgccgagatcggcccgcgcatggccgagttgagcggttcccggctggccgcgcagcaacagatggaaggcctcctggcgccgcaccggcccaaggagcccgcgtggttcctggccaccgtcggcgtctcgcccgaccaccagggcaagggtctgggcagcgccgtcgtgctccccggagtggaggcggccgagcgcgccggggtgcccgccttcctggagacctccgcgccccgcaacctccccttctacgagcggctcggcttcaccgtcaccgccgacgtcgaggtgcccgaaggaccgcgcacctggtgcatgacccgcaagcccggtgcctgacaactttattatacatagttgatggccggccgcttcgagcagacatgataagatacattgatgagtttggacaaaccacaactagaatgcagtgaaaaaaatgctttatttgtgaaatttgtgatgctattgctttatttgtaaccattataagctgcaataaacaagttaacaacaacaattgcattcattttatgtttcaggttcagggggaggtgtgggaggttttttaaagcaagtaaaacctctacaaatgtggtagcggccgcggcgctcttccgcttcctcgctcactgactcgctgcgctcggtcgttcggctgcggcgagcggtatcagctcactcaaaggcggtaatacggttatccacagaatcaggggataacgcaggaaagaacatgtgagcaaaaggccagcaaaaggccaggaaccgtaaaaaggccgcgttgctggcgtttttccataggctccgcccccctgacgagcatcacaaaaatcgacgctcaagtcagaggtggcgaaacccgacaggactataaagataccaggcgtttccccctggaagctccctcgtgcgctctcctgttccgaccctgccgcttaccggatacctgtccgcctttctctcttcgggaagcgtggcgctttctcatagctcacgctgtaggtatctcagttcggtgtaggtcgttcgctccaagctgggctgtgtgcacgaaccccccgttcagcccgaccgctgcgccttatccggtaactatcgtcttgagtccaacccggtaagacacgacttatcgccactggcagcagccactggtaacaggattagcagagcgaggtatgtaggcggtgctacagagttcttgaagtggtggcctaactacggctacactagaagaacagtatttggtatctgcgctctgctgaagccagttaccttcggaaaaagagttggtagctcttgatccggcaaacaaaccaccgctggtagcggtggtttttttgtttgcaagcagcagattacgcgcagaaaaaaaggatctcaagaagatcctttgatcttttctacggggtctgacgctcagtggaacgaaaactcacgttaagggattttggtcatgagattatcaaaaaggatcttcacctagatccttttaaattaaaaatgaagttttaaatcaatctaaagtatatatgagtaaacttggtctgacagttaccaatgcttaatcagtgaggcacctatctcagcgatctgtctatttcgttcatccatagttgcctgactccccgtcgtgtagataactacgatacgggagggcttaccatctggccccagtgctgcaatgataccgcgagacccacgctcaccggctccagatttatcagcaataaaccagccagccggaagggccgagcgcagaagtggtcctgcaactttatccgcctccatccagtctattaattgttgccgggaagctagagtaagtagttcgccagttaatagtttgcgcaacgttgttgccattgctacaggcatcgtggtgtcacgctcgtcgtttggtatggcttcattcagctccggttcccaacgatcaaggcgagttacatgatcccccatgttgtgcaaaaaagcggttagctccttcggtcctccgatcgttgtcagaagtaagttggccgcagtgttatcactcatggttatggcagcactgcataattctcttactgtcatgccatccgtaagatgcttttctgtgactggtgagtactcaaccaagtcattctgagaatagtgtatgcggcgaccgagttgctcttgcccggcgtcaatacgggataataccgcgccacatagcagaactttaaaagtgctcatcattggaaaacgttcttcggggcgaaaactctcaaggatcttaccgctgttgagatccagttcgatgtaacccactcgtgcacccaactgatcttcagcatcttttactttcaccagcgtttctgggtgagcaaaaacaggaaggcaaaatgccgcaaaaaagggaataagggcgacacggaaatgttgaatactcatactcttcctttttcaatattattgaagcatttatcagggttattgtctcatgagcggatacatatttgaatgtatttagaaaaataaacaaataggggttccgcgcacatttccccgaaaagtgccacctgacgtctaagaaaccattattatcatgacattaacctataaaaataggcgtatcacgaggccctttcgtcggcgcgccgcggccgc

SEQ ID NO: 703 - DNA, 4624 bp, synthetic construct
  source 1..4624: mol_type = other DNA
caactttgtatagaaaagttggagggcctatttcccatgattccttcatatttgcatatacgatacaaggctgttagagagataattggaattaatttgactgtaaacacaaagatattagtacaaaatacgtgacgtagaaagtaataatttcttgggtagtttgcagttttaaaattatgttttaaaatggactatcatatgcttaccgtaacttgaaagtatttcgatttcttggctttatatatcttgtggaaaggacgaaacaccgtgcacacctcctggcgggcagctctgctgctgctaaagatgctgctgtgttctggcaatacctgcagcagcaacaaaagcagcagcagggaggcctgccctgactgcccactttttgtttttcaagtttgtacaaaaaagcaggctgggttgcgccttttccaaggcagccctgggtttgcgcagggacgcggctgctctgggcgtggttccgggaaacgcagcggcgccgaccctgggtctcgcacattcttcacgtccgttcgcagcgtcacccggatcttcgccgctacccttgtgggccccccggcgacgcttcctgctccgcccctaagtcgggaaggttccttgcggttcgcggcgtgccggacgtgacaaacggaagccgcacgtctcactagtaccctcgcagacggacagcgccagggagcaatggcagcgcgccgaccgcgatgggctgtggccaatagcggctgctcagcagggcgcgccgagagcagcggccgggaaggggcggtgcgggaggcggggtgtggggcggtagtgtgggccctgttcctgcccgcgcggtgttccgcattctgcaagcctccggagcgcacgtcggcagtcggctccctcgttgaccgaatcaccgacctctctccccaggacccagctttcttgtacaaagtgggccaccatggtgagcaagggcgaggagctgttcaccggggtggtgcccatcctggtcgagctggacggcgacgtaaacggccacaagttcagcgtgtccggcgagggcgagggcgatgccacctacggcaagctgaccctgaagttcatctgcaccaccggcaagctgcccgtgccctggcccaccctcgtgaccaccctgacctacggcgtgcagtgcttcagccgctaccccgaccacatgaagcagcacgacttcttcaagtccgccatgcccgaaggctacgtccaggagcgcaccatcttcttcaaggacgacggcaactacaagacccgcgccgaggtgaagttcgagggcgacaccctggtgaaccgcatcgagctgaagggcatcgacttcaaggaggacggcaacatcctggggcacaagctggagtacaactacaacagccacaacgtctatatcatggccgacaagcagaagaacggcatcaaggtgaacttcaagatccgccacaacatcgaggacggcagcgtgcagctcgccgaccactaccagcagaacacccccatcggcgacggccccgtgctgctgcccgacaaccactacctgagcacccagtccgccctgagcaaagaccccaacgagaagcgcgatcacatggtcctgctggagttcgtgaccgccgccgggatcactctcggcatggacgagctgtacaagggaagcggagagggcaggggaagtcttctaacatgcggggacgtggaggaaaatcccggccccatgaccgagtacaagcccacggtgcgcctcgccacccgcgacgacgtccccagggccgtacgcaccctcgccgccgcgttcgccgactaccccgccacgcgccacaccgtcgatccggaccgccacatcgagcgggtcaccgagctgcaagaactcttcctcacgcgcgtcgggctcgacatcggcaaggtgtgggtcgcggacgacggcgccgcggtggcggtctggaccacgccggagagcgtcgaagcgggggcggtgttcgccgagatcggcccgcgcatggccgagttgagcggttcccggctggccgcgcagcaacagatggaaggcctcctggcgccgcaccggcccaaggagcccgcgtggttcctggccaccgtcggcgtctcgcccgaccaccagggcaagggtctgggcagcgccgtcgtgctccccggagtggaggcggccgagcgcgccggggtgcccgccttcctggagacctccgcgccccgcaacctccccttctacgagcggctcggcttcaccgtcaccgccgacgtcgaggtgcccgaaggaccgcgcacctggtgcatgacccgcaagcccggtgcctgacaactttattatacatagttgatggccggccgcttcgagcagacatgataagatacattgatgagtttggacaaaccacaactagaatgcagtgaaaaaaatgctttatttgtgaaatttgtgatgctattgctttatttgtaaccattataagctgcaataaacaagttaacaacaacaattgcattcattttatgtttcaggttcagggggaggtgtgggaggttttttaaagcaagtaaaacctctacaaatgtggtagcggccgcggcgctcttccgcttcctcgctcactgactcgctgcgctcggtcgttcggctgcggcgagcggtatcagctcactcaaaggcggtaatacggttatccacagaatcaggggataacgcaggaaagaacatgtgagcaaaaggccagcaaaaggccaggaaccgtaaaaaggccgcgttgctggcgtttttccataggctccgcccccctgacgagcatcacaaaaatcgacgctcaagtcagaggtggcgaaacccgacaggactataaagataccaggcgtttccccctggaagctccctcgtgcgctctcctgttccgaccctgccgcttaccggatacctgtccgcctttctctcttcgggaagcgtggcgctttctcatagctcacgctgtaggtatctcagttcggtgtaggtcgttcgctccaagctgggctgtgtgcacgaaccccccgttcagcccgaccgctgcgccttatccggtaactatcgtcttgagtccaacccggtaagacacgacttatcgccactggcagcagccactggtaacaggattagcagagcgaggtatgtaggcggtgctacagagttcttgaagtggtggcctaactacggctacactagaagaacagtatttggtatctgcgctctgctgaagccagttaccttcggaaaaagagttggtagctcttgatccggcaaacaaaccaccgctggtagcggtggtttttttgtttgcaagcagcagattacgcgcagaaaaaaaggatctcaagaagatcctttgatcttttctacggggtctgacgctcagtggaacgaaaactcacgttaagggattttggtcatgagattatcaaaaaggatcttcacctagatccttttaaattaaaaatgaagttttaaatcaatctaaagtatatatgagtaaacttggtctgacagttaccaatgcttaatcagtgaggcacctatctcagcgatctgtctatttcgttcatccatagttgcctgactccccgtcgtgtagataactacgatacgggagggcttaccatctggccccagtgctgcaatgataccgcgagacccacgctcaccggctccagatttatcagcaataaaccagccagccggaagggccgagcgcagaagtggtcctgcaactttatccgcctccatccagtctattaattgttgccgggaagctagagtaagtagttcgccagttaatagtttgcgcaacgttgttgccattgctacaggcatcgtggtgtcacgctcgtcgtttggtatggcttcattcagctccggttcccaacgatcaaggcgagttacatgatcccccatgttgtgcaaaaaagcggttagctccttcggtcctccgatcgttgtcagaagtaagttggccgcagtgttatcactcatggttatggcagcactgcataattctcttactgtcatgccatccgtaagatgcttttctgtgactggtgagtactcaaccaagtcattctgagaatagtgtatgcggcgaccgagttgctcttgcccggcgtcaatacgggataataccgcgccacatagcagaactttaaaagtgctcatcattggaaaacgttcttcggggcgaaaactctcaaggatcttaccgctgttgagatccagttcgatgtaacccactcgtgcacccaactgatcttcagcatcttttactttcaccagcgtttctgggtgagcaaaaacaggaaggcaaaatgccgcaaaaaagggaataagggcgacacggaaatgttgaatactcatactcttcctttttcaatattattgaagcatttatcagggttattgtctcatgagcggatacatatttgaatgtatttagaaaaataaacaaataggggttccgcgcacatttccccgaaaagtgccacctgacgtctaagaaaccattattatcatgacattaacctataaaaataggcgtatcacgaggccctttcgtcggcgcgccgcggccgc

SEQ ID NO: 704 - DNA, 4624 bp, synthetic construct
  source 1..4624: mol_type = other DNA
caactttgtatagaaaagttggagggcctatttcccatgattccttcatatttgcatatacgatacaaggctgttagagagataattggaattaatttgactgtaaacacaaagatattagtacaaaatacgtgacgtagaaagtaataatttcttgggtagtttgcagttttaaaattatgttttaaaatggactatcatatgcttaccgtaacttgaaagtatttcgatttcttggctttatatatcttgtggaaaggacgaaacaccgtgcacacctcctggcgggcagctctgctgctgctacagaagctgctgtgttctggcaatacctgcagcagcaacagaagcagcagcagggaggcctgccctgactgcccactttttgtttttcaagtttgtacaaaaaagcaggctgggttgcgccttttccaaggcagccctgggtttgcgcagggacgcggctgctctgggcgtggttccgggaaacgcagcggcgccgaccctgggtctcgcacattcttcacgtccgttcgcagcgtcacccggatcttcgccgctacccttgtgggccccccggcgacgcttcctgctccgcccctaagtcgggaaggttccttgcggttcgcggcgtgccggacgtgacaaacggaagccgcacgtctcactagtaccctcgcagacggacagcgccagggagcaatggcagcgcgccgaccgcgatgggctgtggccaatagcggctgctcagcagggcgcgccgagagcagcggccgggaaggggcggtgcgggaggcggggtgtggggcggtagtgtgggccctgttcctgcccgcgcggtgttccgcattctgcaagcctccggagcgcacgtcggcagtcggctccctcgttgaccgaatcaccgacctctctccccaggacccagctttcttgtacaaagtgggccaccatggtgagcaagggcgaggagctgttcaccggggtggtgcccatcctggtcgagctggacggcgacgtaaacggccacaagttcagcgtgtccggcgagggcgagggcgatgccacctacggcaagctgaccctgaagttcatctgcaccaccggcaagctgcccgtgccctggcccaccctcgtgaccaccctgacctacggcgtgcagtgcttcagccgctaccccgaccacatgaagcagcacgacttcttcaagtccgccatgcccgaaggctacgtccaggagcgcaccatcttcttcaaggacgacggcaactacaagacccgcgccgaggtgaagttcgagggcgacaccctggtgaaccgcatcgagctgaagggcatcgacttcaaggaggacggcaacatcctggggcacaagctggagtacaactacaacagccacaacgtctatatcatggccgacaagcagaagaacggcatcaaggtgaacttcaagatccgccacaacatcgaggacggcagcgtgcagctcgccgaccactaccagcagaacacccccatcggcgacggccccgtgctgctgcccgacaaccactacctgagcacccagtccgccctgagcaaagaccccaacgagaagcgcgatcacatggtcctgctggagttcgtgaccgccgccgggatcactctcggcatggacgagctgtacaagggaagcggagagggcaggggaagtcttctaacatgcggggacgtggaggaaaatcccggccccatgaccgagtacaagcccacggtgcgcctcgccacccgcgacgacgtccccagggccgtacgcaccctcgccgccgcgttcgccgactaccccgccacgcgccacaccgtcgatccggaccgccacatcgagcgggtcaccgagctgcaagaactcttcctcacgcgcgtcgggctcgacatcggcaaggtgtgggtcgcggacgacggcgccgcggtggcggtctggaccacgccggagagcgtcgaagcgggggcggtgttcgccgagatcggcccgcgcatggccgagttgagcggttcccggctggccgcgcagcaacagatggaaggcctcctggcgccgcaccggcccaaggagcccgcgtggttcctggccaccgtcggcgtctcgcccgaccaccagggcaagggtctgggcagcgccgtcgtgctccccggagtggaggcggccgagcgcgccggggtgcccgccttcctggagacctccgcgccccgcaacctccccttctacgagcggctcggcttcaccgtcaccgccgacgtcgaggtgcccgaaggaccgcgcacctggtgcatgacccgcaagcccggtgcctgacaactttattatacatagttgatggccggccgcttcgagcagacatgataagatacattgatgagtttggacaaaccacaactagaatgcagtgaaaaaaatgctttatttgtgaaatttgtgatgctattgctttatttgtaaccattataagctgcaataaacaagttaacaacaacaattgcattcattttatgtttcaggttcagggggaggtgtgggaggttttttaaagcaagtaaaacctctacaaatgtggtagcggccgcggcgctcttccgcttcctcgctcactgactcgctgcgctcggtcgttcggctgcggcgagcggtatcagctcactcaaaggcggtaatacggttatccacagaatcaggggataacgcaggaaagaacatgtgagcaaaaggccagcaaaaggccaggaaccgtaaaaaggccgcgttgctggcgtttttccataggctccgcccccctgacgagcatcacaaaaatcgacgctcaagtcagaggtggcgaaacccgacaggactataaagataccaggcgtttccccctggaagctccctcgtgcgctctcctgttccgaccctgccgcttaccggatacctgtccgcctttctctcttcgggaagcgtggcgctttctcatagctcacgctgtaggtatctcagttcggtgtaggtcgttcgctccaagctgggctgtgtgcacgaaccccccgttcagcccgaccgctgcgccttatccggtaactatcgtcttgagtccaacccggtaagacacgacttatcgccactggcagcagccactggtaacaggattagcagagcgaggtatgtaggcggtgctacagagttcttgaagtggtggcctaactacggctacactagaagaacagtatttggtatctgcgctctgctgaagccagttaccttcggaaaaagagttggtagctcttgatccggcaaacaaaccaccgctggtagcggtggtttttttgtttgcaagcagcagattacgcgcagaaaaaaaggatctcaagaagatcctttgatcttttctacggggtctgacgctcagtggaacgaaaactcacgttaagggattttggtcatgagattatcaaaaaggatcttcacctagatccttttaaattaaaaatgaagttttaaatcaatctaaagtatatatgagtaaacttggtctgacagttaccaatgcttaatcagtgaggcacctatctcagcgatctgtctatttcgttcatccatagttgcctgactccccgtcgtgtagataactacgatacgggagggcttaccatctggccccagtgctgcaatgataccgcgagacccacgctcaccggctccagatttatcagcaataaaccagccagccggaagggccgagcgcagaagtggtcctgcaactttatccgcctccatccagtctattaattgttgccgggaagctagagtaagtagttcgccagttaatagtttgcgcaacgttgttgccattgctacaggcatcgtggtgtcacgctcgtcgtttggtatggcttcattcagctccggttcccaacgatcaaggcgagttacatgatcccccatgttgtgcaaaaaagcggttagctccttcggtcctccgatcgttgtcagaagtaagttggccgcagtgttatcactcatggttatggcagcactgcataattctcttactgtcatgccatccgtaagatgcttttctgtgactggtgagtactcaaccaagtcattctgagaatagtgtatgcggcgaccgagttgctcttgcccggcgtcaatacgggataataccgcgccacatagcagaactttaaaagtgctcatcattggaaaacgttcttcggggcgaaaactctcaaggatcttaccgctgttgagatccagttcgatgtaacccactcgtgcacccaactgatcttcagcatcttttactttcaccagcgtttctgggtgagcaaaaacaggaaggcaaaatgccgcaaaaaagggaataagggcgacacggaaatgttgaatactcatactcttcctttttcaatattattgaagcatttatcagggttattgtctcatgagcggatacatatttgaatgtatttagaaaaataaacaaataggggttccgcgcacatttccccgaaaagtgccacctgacgtctaagaaaccattattatcatgacattaacctataaaaataggcgtatcacgaggccctttcgtcggcgcgccgcggccgc

SEQ ID NO: 705 - DNA, 4624 bp, synthetic construct
  source 1..4624: mol_type = other DNA
caactttgtatagaaaagttggagggcctatttcccatgattccttcatatttgcatatacgatacaaggctgttagagagataattggaattaatttgactgtaaacacaaagatattagtacaaaatacgtgacgtagaaagtaataatttcttgggtagtttgcagttttaaaattatgttttaaaatggactatcatatgcttaccgtaacttgaaagtatttcgatttcttggctttatatatcttgtggaaaggacgaaacaccgtgcacacctcctggcgggcagctctgctgctgctacagatgatgctgtgttctggcaatacctgcagcaacaacagaagcagcagcagggaggcctgccctgactgcccactttttgtttttcaagtttgtacaaaaaagcaggctgggttgcgccttttccaaggcagccctgggtttgcgcagggacgcggctgctctgggcgtggttccgggaaacgcagcggcgccgaccctgggtctcgcacattcttcacgtccgttcgcagcgtcacccggatcttcgccgctacccttgtgggccccccggcgacgcttcctgctccgcccctaagtcgggaaggttccttgcggttcgcggcgtgccggacgtgacaaacggaagccgcacgtctcactagtaccctcgcagacggacagcgccagggagcaatggcagcgcgccgaccgcgatgggctgtggccaatagcggctgctcagcagggcgcgccgagagcagcggccgggaaggggcggtgcgggaggcggggtgtggggcggtagtgtgggccctgttcctgcccgcgcggtgttccgcattctgcaagcctccggagcgcacgtcggcagtcggctccctcgttgaccgaatcaccgacctctctccccaggacccagctttcttgtacaaagtgggccaccatggtgagcaagggcgaggagctgttcaccggggtggtgcccatcctggtcgagctggacggcgacgtaaacggccacaagttcagcgtgtccggcgagggcgagggcgatgccacctacggcaagctgaccctgaagttcatctgcaccaccggcaagctgcccgtgccctggcccaccctcgtgaccaccctgacctacggcgtgcagtgcttcagccgctaccccgaccacatgaagcagcacgacttcttcaagtccgccatgcccgaaggctacgtccaggagcgcaccatcttcttcaaggacgacggcaactacaagacccgcgccgaggtgaagttcgagggcgacaccctggtgaaccgcatcgagctgaagggcatcgacttcaaggaggacggcaacatcctggggcacaagctggagtacaactacaacagccacaacgtctatatcatggccgacaagcagaagaacggcatcaaggtgaacttcaagatccgccacaacatcgaggacggcagcgtgcagctcgccgaccactaccagcagaacacccccatcggcgacggccccgtgctgctgcccgacaaccactacctgagcacccagtccgccctgagcaaagaccccaacgagaagcgcgatcacatggtcctgctggagttcgtgaccgccgccgggatcactctcggcatggacgagctgtacaagggaagcggagagggcaggggaagtcttctaacatgcggggacgtggaggaaaatcccggccccatgaccgagtacaagcccacggtgcgcctcgccacccgcgacgacgtccccagggccgtacgcaccctcgccgccgcgttcgccgactaccccgccacgcgccacaccgtcgatccggaccgccacatcgagcgggtcaccgagctgcaagaactcttcctcacgcgcgtcgggctcgacatcggcaaggtgtgggtcgcggacgacggcgccgcggtggcggtctggaccacgccggagagcgtcgaagcgggggcggtgttcgccgagatcggcccgcgcatggccgagttgagcggttcccggctggccgcgcagcaacagatggaaggcctcctggcgccgcaccggcccaaggagcccgcgtggttcctggccaccgtcggcgtctcgcccgaccaccagggcaagggtctgggcagcgccgtcgtgctccccggagtggaggcggccgagcgcgccggggtgcccgccttcctggagacctccgcgccccgcaacctccccttctacgagcggctcggcttcaccgtcaccgccgacgtcgaggtgcccgaaggaccgcgcacctggtgcatgacccgcaagcccggtgcctgacaactttattatacatagttgatggccggccgcttcgagcagacatgataagatacattgatgagtttggacaaaccacaactagaatgcagtgaaaaaaatgctttatttgtgaaatttgtgatgctattgctttatttgtaaccattataagctgcaataaacaagttaacaacaacaattgcattcattttatgtttcaggttcagggggaggtgtgggaggttttttaaagcaagtaaaacctctacaaatgtggtagcggccgcggcgctcttccgcttcctcgctcactgactcgctgcgctcggtcgttcggctgcggcgagcggtatcagctcactcaaaggcggtaatacggttatccacagaatcaggggataacgcaggaaagaacatgtgagcaaaaggccagcaaaaggccaggaaccgtaaaaaggccgcgttgctggcgtttttccataggctccgcccccctgacgagcatcacaaaaatcgacgctcaagtcagaggtggcgaaacccgacaggactataaagataccaggcgtttccccctggaagctccctcgtgcgctctcctgttccgaccctgccgcttaccggatacctgtccgcctttctctcttcgggaagcgtggcgctttctcatagctcacgctgtaggtatctcagttcggtgtaggtcgttcgctccaagctgggctgtgtgcacgaaccccccgttcagcccgaccgctgcgccttatccggtaactatcgtcttgagtccaacccggtaagacacgacttatcgccactggcagcagccactggtaacaggattagcagagcgaggtatgtaggcggtgctacagagttcttgaagtggtggcctaactacggctacactagaagaacagtatttggtatctgcgctctgctgaagccagttaccttcggaaaaagagttggtagctcttgatccggcaaacaaaccaccgctggtagcggtggtttttttgtttgcaagcagcagattacgcgcagaaaaaaaggatctcaagaagatcctttgatcttttctacggggtctgacgctcagtggaacgaaaactcacgttaagggattttggtcatgagattatcaaaaaggatcttcacctagatccttttaaattaaaaatgaagttttaaatcaatctaaagtatatatgagtaaacttggtctgacagttaccaatgcttaatcagtgaggcacctatctcagcgatctgtctatttcgttcatccatagttgcctgactccccgtcgtgtagataactacgatacgggagggcttaccatctggccccagtgctgcaatgataccgcgagacccacgctcaccggctccagatttatcagcaataaaccagccagccggaagggccgagcgcagaagtggtcctgcaactttatccgcctccatccagtctattaattgttgccgggaagctagagtaagtagttcgccagttaatagtttgcgcaacgttgttgccattgctacaggcatcgtggtgtcacgctcgtcgtttggtatggcttcattcagctccggttcccaacgatcaaggcgagttacatgatcccccatgttgtgcaaaaaagcggttagctccttcggtcctccgatcgttgtcagaagtaagttggccgcagtgttatcactcatggttatggcagcactgcataattctcttactgtcatgccatccgtaagatgcttttctgtgactggtgagtactcaaccaagtcattctgagaatagtgtatgcggcgaccgagttgctcttgcccggcgtcaatacgggataataccgcgccacatagcagaactttaaaagtgctcatcattggaaaacgttcttcggggcgaaaactctcaaggatcttaccgctgttgagatccagttcgatgtaacccactcgtgcacccaactgatcttcagcatcttttactttcaccagcgtttctgggtgagcaaaaacaggaaggcaaaatgccgcaaaaaagggaataagggcgacacggaaatgttgaatactcatactcttcctttttcaatattattgaagcatttatcagggttattgtctcatgagcggatacatatttgaatgtatttagaaaaataaacaaataggggttccgcgcacatttccccgaaaagtgccacctgacgtctaagaaaccattattatcatgacattaacctataaaaataggcgtatcacgaggccctttcgtcggcgcgccgcggccgc

SEQ ID NO: 706 - DNA, 4624 bp, synthetic construct
  source 1..4624: mol_type = other DNA
caactttgtatagaaaagttggagggcctatttcccatgattccttcatatttgcatatacgatacaaggctgttagagagataattggaattaatttgactgtaaacacaaagatattagtacaaaatacgtgacgtagaaagtaataatttcttgggtagtttgcagttttaaaattatgttttaaaatggactatcatatgcttaccgtaacttgaaagtatttcgatttcttggctttatatatcttgtggaaaggacgaaacaccgtgcacacctcctggcgggcagctctgctgctgctacagcagatgctgtgttctggcaatacctgcagcaacagcagaagcagcagcagggaggcctgccctgactgcccactttttgtttttcaagtttgtacaaaaaagcaggctgggttgcgccttttccaaggcagccctgggtttgcgcagggacgcggctgctctgggcgtggttccgggaaacgcagcggcgccgaccctgggtctcgcacattcttcacgtccgttcgcagcgtcacccggatcttcgccgctacccttgtgggccccccggcgacgcttcctgctccgcccctaagtcgggaaggttccttgcggttcgcggcgtgccggacgtgacaaacggaagccgcacgtctcactagtaccctcgcagacggacagcgccagggagcaatggcagcgcgccgaccgcgatgggctgtggccaatagcggctgctcagcagggcgcgccgagagcagcggccgggaaggggcggtgcgggaggcggggtgtggggcggtagtgtgggccctgttcctgcccgcgcggtgttccgcattctgcaagcctccggagcgcacgtcggcagtcggctccctcgttgaccgaatcaccgacctctctccccaggacccagctttcttgtacaaagtgggccaccatggtgagcaagggcgaggagctgttcaccggggtggtgcccatcctggtcgagctggacggcgacgtaaacggccacaagttcagcgtgtccggcgagggcgagggcgatgccacctacggcaagctgaccctgaagttcatctgcaccaccggcaagctgcccgtgccctggcccaccctcgtgaccaccctgacctacggcgtgcagtgcttcagccgctaccccgaccacatgaagcagcacgacttcttcaagtccgccatgcccgaaggctacgtccaggagcgcaccatcttcttcaaggacgacggcaactacaagacccgcgccgaggtgaagttcgagggcgacaccctggtgaaccgcatcgagctgaagggcatcgacttcaaggaggacggcaacatcctggggcacaagctggagtacaactacaacagccacaacgtctatatcatggccgacaagcagaagaacggcatcaaggtgaacttcaagatccgccacaacatcgaggacggcagcgtgcagctcgccgaccactaccagcagaacacccccatcggcgacggccccgtgctgctgcccgacaaccactacctgagcacccagtccgccctgagcaaagaccccaacgagaagcgcgatcacatggtcctgctggagttcgtgaccgccgccgggatcactctcggcatggacgagctgtacaagggaagcggagagggcaggggaagtcttctaacatgcggggacgtggaggaaaatcccggccccatgaccgagtacaagcccacggtgcgcctcgccacccgcgacgacgtccccagggccgtacgcaccctcgccgccgcgttcgccgactaccccgccacgcgccacaccgtcgatccggaccgccacatcgagcgggtcaccgagctgcaagaactcttcctcacgcgcgtcgggctcgacatcggcaaggtgtgggtcgcggacgacggcgccgcggtggcggtctggaccacgccggagagcgtcgaagcgggggcggtgttcgccgagatcggcccgcgcatggccgagttgagcggttcccggctggccgcgcagcaacagatggaaggcctcctggcgccgcaccggcccaaggagcccgcgtggttcctggccaccgtcggcgtctcgcccgaccaccagggcaagggtctgggcagcgccgtcgtgctccccggagtggaggcggccgagcgcgccggggtgcccgccttcctggagacctccgcgccccgcaacctccccttctacgagcggctcggcttcaccgtcaccgccgacgtcgaggtgcccgaaggaccgcgcacctggtgcatgacccgcaagcccggtgcctgacaactttattatacatagttgatggccggccgcttcgagcagacatgataagatacattgatgagtttggacaaaccacaactagaatgcagtgaaaaaaatgctttatttgtgaaatttgtgatgctattgctttatttgtaaccattataagctgcaataaacaagttaacaacaacaattgcattcattttatgtttcaggttcagggggaggtgtgggaggttttttaaagcaagtaaaacctctacaaatgtggtagcggccgcggcgctcttccgcttcctcgctcactgactcgctgcgctcggtcgttcggctgcggcgagcggtatcagctcactcaaaggcggtaatacggttatccacagaatcaggggataacgcaggaaagaacatgtgagcaaaaggccagcaaaaggccaggaaccgtaaaaaggccgcgttgctggcgtttttccataggctccgcccccctgacgagcatcacaaaaatcgacgctcaagtcagaggtggcgaaacccgacaggactataaagataccaggcgtttccccctggaagctccctcgtgcgctctcctgttccgaccctgccgcttaccggatacctgtccgcctttctctcttcgggaagcgtggcgctttctcatagctcacgctgtaggtatctcagttcggtgtaggtcgttcgctccaagctgggctgtgtgcacgaaccccccgttcagcccgaccgctgcgccttatccggtaactatcgtcttgagtccaacccggtaagacacgacttatcgccactggcagcagccactggtaacaggattagcagagcgaggtatgtaggcggtgctacagagttcttgaagtggtggcctaactacggctacactagaagaacagtatttggtatctgcgctctgctgaagccagttaccttcggaaaaagagttggtagctcttgatccggcaaacaaaccaccgctggtagcggtggtttttttgtttgcaagcagcagattacgcgcagaaaaaaaggatctcaagaagatcctttgatcttttctacggggtctgacgctcagtggaacgaaaactcacgttaagggattttggtcatgagattatcaaaaaggatcttcacctagatccttttaaattaaaaatgaagttttaaatcaatctaaagtatatatgagtaaacttggtctgacagttaccaatgcttaatcagtgaggcacctatctcagcgatctgtctatttcgttcatccatagttgcctgactccccgtcgtgtagataactacgatacgggagggcttaccatctggccccagtgctgcaatgataccgcgagacccacgctcaccggctccagatttatcagcaataaaccagccagccggaagggccgagcgcagaagtggtcctgcaactttatccgcctccatccagtctattaattgttgccgggaagctagagtaagtagttcgccagttaatagtttgcgcaacgttgttgccattgctacaggcatcgtggtgtcacgctcgtcgtttggtatggcttcattcagctccggttcccaacgatcaaggcgagttacatgatcccccatgttgtgcaaaaaagcggttagctccttcggtcctccgatcgttgtcagaagtaagttggccgcagtgttatcactcatggttatggcagcactgcataattctcttactgtcatgccatccgtaagatgcttttctgtgactggtgagtactcaaccaagtcattctgagaatagtgtatgcggcgaccgagttgctcttgcccggcgtcaatacgggataataccgcgccacatagcagaactttaaaagtgctcatcattggaaaacgttcttcggggcgaaaactctcaaggatcttaccgctgttgagatccagttcgatgtaacccactcgtgcacccaactgatcttcagcatcttttactttcaccagcgtttctgggtgagcaaaaacaggaaggcaaaatgccgcaaaaaagggaataagggcgacacggaaatgttgaatactcatactcttcctttttcaatattattgaagcatttatcagggttattgtctcatgagcggatacatatttgaatgtatttagaaaaataaacaaataggggttccgcgcacatttccccgaaaagtgccacctgacgtctaagaaaccattattatcatgacattaacctataaaaataggcgtatcacgaggccctttcgtcggcgcgccgcggccgc

SEQ ID NO: 707 - DNA, 4624 bp, synthetic construct
  source 1..4624: mol_type = other DNA
caactttgtatagaaaagttggagggcctatttcccatgattccttcatatttgcatatacgatacaaggctgttagagagataattggaattaatttgactgtaaacacaaagatattagtacaaaatacgtgacgtagaaagtaataatttcttgggtagtttgcagttttaaaattatgttttaaaatggactatcatatgcttaccgtaacttgaaagtatttcgatttcttggctttatatatcttgtggaaaggacgaaacaccgtgcacacctcctggcgggcagctctgctgctgctgaagatactgctgtgttctggcaatacctgcagcagaaacaacagcagcagcagggaggcctgccctgactgcccactttttgtttttcaagtttgtacaaaaaagcaggctgggttgcgccttttccaaggcagccctgggtttgcgcagggacgcggctgctctgggcgtggttccgggaaacgcagcggcgccgaccctgggtctcgcacattcttcacgtccgttcgcagcgtcacccggatcttcgccgctacccttgtgggccccccggcgacgcttcctgctccgcccctaagtcgggaaggttccttgcggttcgcggcgtgccggacgtgacaaacggaagccgcacgtctcactagtaccctcgcagacggacagcgccagggagcaatggcagcgcgccgaccgcgatgggctgtggccaatagcggctgctcagcagggcgcgccgagagcagcggccgggaaggggcggtgcgggaggcggggtgtggggcggtagtgtgggccctgttcctgcccgcgcggtgttccgcattctgcaagcctccggagcgcacgtcggcagtcggctccctcgttgaccgaatcaccgacctctctccccaggacccagctttcttgtacaaagtgggccaccatggtgagcaagggcgaggagctgttcaccggggtggtgcccatcctggtcgagctggacggcgacgtaaacggccacaagttcagcgtgtccggcgagggcgagggcgatgccacctacggcaagctgaccctgaagttcatctgcaccaccggcaagctgcccgtgccctggcccaccctcgtgaccaccctgacctacggcgtgcagtgcttcagccgctaccccgaccacatgaagcagcacgacttcttcaagtccgccatgcccgaaggctacgtccaggagcgcaccatcttcttcaaggacgacggcaactacaagacccgcgccgaggtgaagttcgagggcgacaccctggtgaaccgcatcgagctgaagggcatcgacttcaaggaggacggcaacatcctggggcacaagctggagtacaactacaacagccacaacgtctatatcatggccgacaagcagaagaacggcatcaaggtgaacttcaagatccgccacaacatcgaggacggcagcgtgcagctcgccgaccactaccagcagaacacccccatcggcgacggccccgtgctgctgcccgacaaccactacctgagcacccagtccgccctgagcaaagaccccaacgagaagcgcgatcacatggtcctgctggagttcgtgaccgccgccgggatcactctcggcatggacgagctgtacaagggaagcggagagggcaggggaagtcttctaacatgcggggacgtggaggaaaatcccggccccatgaccgagtacaagcccacggtgcgcctcgccacccgcgacgacgtccccagggccgtacgcaccctcgccgccgcgttcgccgactaccccgccacgcgccacaccgtcgatccggaccgccacatcgagcgggtcaccgagctgcaagaactcttcctcacgcgcgtcgggctcgacatcggcaaggtgtgggtcgcggacgacggcgccgcggtggcggtctggaccacgccggagagcgtcgaagcgggggcggtgttcgccgagatcggcccgcgcatggccgagttgagcggttcccggctggccgcgcagcaacagatggaaggcctcctggcgccgcaccggcccaaggagcccgcgtggttcctggccaccgtcggcgtctcgcccgaccaccagggcaagggtctgggcagcgccgtcgtgctccccggagtggaggcggccgagcgcgccggggtgcccgccttcctggagacctccgcgccccgcaacctccccttctacgagcggctcggcttcaccgtcaccgccgacgtcgaggtgcccgaaggaccgcgcacctggtgcatgacccgcaagcccggtgcctgacaactttattatacatagttgatggccggccgcttcgagcagacatgataagatacattgatgagtttggacaaaccacaactagaatgcagtgaaaaaaatgctttatttgtgaaatttgtgatgctattgctttatttgtaaccattataagctgcaataaacaagttaacaacaacaattgcattcattttatgtttcaggttcagggggaggtgtgggaggttttttaaagcaagtaaaacctctacaaatgtggtagcggccgcggcgctcttccgcttcctcgctcactgactcgctgcgctcggtcgttcggctgcggcgagcggtatcagctcactcaaaggcggtaatacggttatccacagaatcaggggataacgcaggaaagaacatgtgagcaaaaggccagcaaaaggccaggaaccgtaaaaaggccgcgttgctggcgtttttccataggctccgcccccctgacgagcatcacaaaaatcgacgctcaagtcagaggtggcgaaacccgacaggactataaagataccaggcgtttccccctggaagctccctcgtgcgctctcctgttccgaccctgccgcttaccggatacctgtccgcctttctctcttcgggaagcgtggcgctttctcatagctcacgctgtaggtatctcagttcggtgtaggtcgttcgctccaagctgggctgtgtgcacgaaccccccgttcagcccgaccgctgcgccttatccggtaactatcgtcttgagtccaacccggtaagacacgacttatcgccactggcagcagccactggtaacaggattagcagagcgaggtatgtaggcggtgctacagagttcttgaagtggtggcctaactacggctacactagaagaacagtatttggtatctgcgctctgctgaagccagttaccttcggaaaaagagttggtagctcttgatccggcaaacaaaccaccgctggtagcggtggtttttttgtttgcaagcagcagattacgcgcagaaaaaaaggatctcaagaagatcctttgatcttttctacggggtctgacgctcagtggaacgaaaactcacgttaagggattttggtcatgagattatcaaaaaggatcttcacctagatccttttaaattaaaaatgaagttttaaatcaatctaaagtatatatgagtaaacttggtctgacagttaccaatgcttaatcagtgaggcacctatctcagcgatctgtctatttcgttcatccatagttgcctgactccccgtcgtgtagataactacgatacgggagggcttaccatctggccccagtgctgcaatgataccgcgagacccacgctcaccggctccagatttatcagcaataaaccagccagccggaagggccgagcgcagaagtggtcctgcaactttatccgcctccatccagtctattaattgttgccgggaagctagagtaagtagttcgccagttaatagtttgcgcaacgttgttgccattgctacaggcatcgtggtgtcacgctcgtcgtttggtatggcttcattcagctccggttcccaacgatcaaggcgagttacatgatcccccatgttgtgcaaaaaagcggttagctccttcggtcctccgatcgttgtcagaagtaagttggccgcagtgttatcactcatggttatggcagcactgcataattctcttactgtcatgccatccgtaagatgcttttctgtgactggtgagtactcaaccaagtcattctgagaatagtgtatgcggcgaccgagttgctcttgcccggcgtcaatacgggataataccgcgccacatagcagaactttaaaagtgctcatcattggaaaacgttcttcggggcgaaaactctcaaggatcttaccgctgttgagatccagttcgatgtaacccactcgtgcacccaactgatcttcagcatcttttactttcaccagcgtttctgggtgagcaaaaacaggaaggcaaaatgccgcaaaaaagggaataagggcgacacggaaatgttgaatactcatactcttcctttttcaatattattgaagcatttatcagggttattgtctcatgagcggatacatatttgaatgtatttagaaaaataaacaaataggggttccgcgcacatttccccgaaaagtgccacctgacgtctaagaaaccattattatcatgacattaacctataaaaataggcgtatcacgaggccctttcgtcggcgcgccgcggccgc

SEQ ID NO: 708 - DNA, 4624 bp, synthetic construct
  source 1..4624: mol_type = other DNA
caactttgtatagaaaagttggagggcctatttcccatgattccttcatatttgcatatacgatacaaggctgttagagagataattggaattaatttgactgtaaacacaaagatattagtacaaaatacgtgacgtagaaagtaataatttcttgggtagtttgcagttttaaaattatgttttaaaatggactatcatatgcttaccgtaacttgaaagtatttcgatttcttggctttatatatcttgtggaaaggacgaaacaccgtgcacacctcctggcgggcagctctgctgctgctgaagcaactgctgtgttctggcaatacctgcagcagaagcaacagcagcagcagggaggcctgccctgactgcccactttttgtttttcaagtttgtacaaaaaagcaggctgggttgcgccttttccaaggcagccctgggtttgcgcagggacgcggctgctctgggcgtggttccgggaaacgcagcggcgccgaccctgggtctcgcacattcttcacgtccgttcgcagcgtcacccggatcttcgccgctacccttgtgggccccccggcgacgcttcctgctccgcccctaagtcgggaaggttccttgcggttcgcggcgtgccggacgtgacaaacggaagccgcacgtctcactagtaccctcgcagacggacagcgccagggagcaatggcagcgcgccgaccgcgatgggctgtggccaatagcggctgctcagcagggcgcgccgagagcagcggccgggaaggggcggtgcgggaggcggggtgtggggcggtagtgtgggccctgttcctgcccgcgcggtgttccgcattctgcaagcctccggagcgcacgtcggcagtcggctccctcgttgaccgaatcaccgacctctctccccaggacccagctttcttgtacaaagtgggccaccatggtgagcaagggcgaggagctgttcaccggggtggtgcccatcctggtcgagctggacggcgacgtaaacggccacaagttcagcgtgtccggcgagggcgagggcgatgccacctacggcaagctgaccctgaagttcatctgcaccaccggcaagctgcccgtgccctggcccaccctcgtgaccaccctgacctacggcgtgcagtgcttcagccgctaccccgaccacatgaagcagcacgacttcttcaagtccgccatgcccgaaggctacgtccaggagcgcaccatcttcttcaaggacgacggcaactacaagacccgcgccgaggtgaagttcgagggcgacaccctggtgaaccgcatcgagctgaagggcatcgacttcaaggaggacggcaacatcctggggcacaagctggagtacaactacaacagccacaacgtctatatcatggccgacaagcagaagaacggcatcaaggtgaacttcaagatccgccacaacatcgaggacggcagcgtgcagctcgccgaccactaccagcagaacacccccatcggcgacggccccgtgctgctgcccgacaaccactacctgagcacccagtccgccctgagcaaagaccccaacgagaagcgcgatcacatggtcctgctggagttcgtgaccgccgccgggatcactctcggcatggacgagctgtacaagggaagcggagagggcaggggaagtcttctaacatgcggggacgtggaggaaaatcccggccccatgaccgagtacaagcccacggtgcgcctcgccacccgcgacgacgtccccagggccgtacgcaccctcgccgccgcgttcgccgactaccccgccacgcgccacaccgtcgatccggaccgccacatcgagcgggtcaccgagctgcaagaactcttcctcacgcgcgtcgggctcgacatcggcaaggtgtgggtcgcggacgacggcgccgcggtggcggtctggaccacgccggagagcgtcgaagcgggggcggtgttcgccgagatcggcccgcgcatggccgagttgagcggttcccggctggccgcgcagcaacagatggaaggcctcctggcgccgcaccggcccaaggagcccgcgtggttcctggccaccgtcggcgtctcgcccgaccaccagggcaagggtctgggcagcgccgtcgtgctccccggagtggaggcggccgagcgcgccggggtgcccgccttcctggagacctccgcgccccgcaacctccccttctacgagcggctcggcttcaccgtcaccgccgacgtcgaggtgcccgaaggaccgcgcacctggtgcatgacccgcaagcccggtgcctgacaactttattatacatagttgatggccggccgcttcgagcagacatgataagatacattgatgagtttggacaaaccacaactagaatgcagtgaaaaaaatgctttatttgtgaaatttgtgatgctattgctttatttgtaaccattataagctgcaataaacaagttaacaacaacaattgcattcattttatgtttcaggttcagggggaggtgtgggaggttttttaaagcaagtaaaacctctacaaatgtggtagcggccgcggcgctcttccgcttcctcgctcactgactcgctgcgctcggtcgttcggctgcggcgagcggtatcagctcactcaaaggcggtaatacggttatccacagaatcaggggataacgcaggaaagaacatgtgagcaaaaggccagcaaaaggccaggaaccgtaaaaaggccgcgttgctggcgtttttccataggctccgcccccctgacgagcatcacaaaaatcgacgctcaagtcagaggtggcgaaacccgacaggactataaagataccaggcgtttccccctggaagctccctcgtgcgctctcctgttccgaccctgccgcttaccggatacctgtccgcctttctctcttcgggaagcgtggcgctttctcatagctcacgctgtaggtatctcagttcggtgtaggtcgttcgctccaagctgggctgtgtgcacgaaccccccgttcagcccgaccgctgcgccttatccggtaactatcgtcttgagtccaacccggtaagacacgacttatcgccactggcagcagccactggtaacaggattagcagagcgaggtatgtaggcggtgctacagagttcttgaagtggtggcctaactacggctacactagaagaacagtatttggtatctgcgctctgctgaagccagttaccttcggaaaaagagttggtagctcttgatccggcaaacaaaccaccgctggtagcggtggtttttttgtttgcaagcagcagattacgcgcagaaaaaaaggatctcaagaagatcctttgatcttttctacggggtctgacgctcagtggaacgaaaactcacgttaagggattttggtcatgagattatcaaaaaggatcttcacctagatccttttaaattaaaaatgaagttttaaatcaatctaaagtatatatgagtaaacttggtctgacagttaccaatgcttaatcagtgaggcacctatctcagcgatctgtctatttcgttcatccatagttgcctgactccccgtcgtgtagataactacgatacgggagggcttaccatctggccccagtgctgcaatgataccgcgagacccacgctcaccggctccagatttatcagcaataaaccagccagccggaagggccgagcgcagaagtggtcctgcaactttatccgcctccatccagtctattaattgttgccgggaagctagagtaagtagttcgccagttaatagtttgcgcaacgttgttgccattgctacaggcatcgtggtgtcacgctcgtcgtttggtatggcttcattcagctccggttcccaacgatcaaggcgagttacatgatcccccatgttgtgcaaaaaagcggttagctccttcggtcctccgatcgttgtcagaagtaagttggccgcagtgttatcactcatggttatggcagcactgcataattctcttactgtcatgccatccgtaagatgcttttctgtgactggtgagtactcaaccaagtcattctgagaatagtgtatgcggcgaccgagttgctcttgcccggcgtcaatacgggataataccgcgccacatagcagaactttaaaagtgctcatcattggaaaacgttcttcggggcgaaaactctcaaggatcttaccgctgttgagatccagttcgatgtaacccactcgtgcacccaactgatcttcagcatcttttactttcaccagcgtttctgggtgagcaaaaacaggaaggcaaaatgccgcaaaaaagggaataagggcgacacggaaatgttgaatactcatactcttcctttttcaatattattgaagcatttatcagggttattgtctcatgagcggatacatatttgaatgtatttagaaaaataaacaaataggggttccgcgcacatttccccgaaaagtgccacctgacgtctaagaaaccattattatcatgacattaacctataaaaataggcgtatcacgaggccctttcgtcggcgcgccgcggccgc

SEQ ID NO: 709 - DNA, 4624 bp, synthetic construct
  source 1..4624: mol_type = other DNA
caactttgtatagaaaagttggagggcctatttcccatgattccttcatatttgcatatacgatacaaggctgttagagagataattggaattaatttgactgtaaacacaaagatattagtacaaaatacgtgacgtagaaagtaataatttcttgggtagtttgcagttttaaaattatgttttaaaatggactatcatatgcttaccgtaacttgaaagtatttcgatttcttggctttatatatcttgtggaaaggacgaaacaccgtgcacacctcctggcgggcagctctgctgctgctaaaactgctgctgtgttctggcaatacctgcagcagcagaaaaagcagcagcagggaggcctgccctgactgcccactttttgtttttcaagtttgtacaaaaaagcaggctgggttgcgccttttccaaggcagccctgggtttgcgcagggacgcggctgctctgggcgtggttccgggaaacgcagcggcgccgaccctgggtctcgcacattcttcacgtccgttcgcagcgtcacccggatcttcgccgctacccttgtgggccccccggcgacgcttcctgctccgcccctaagtcgggaaggttccttgcggttcgcggcgtgccggacgtgacaaacggaagccgcacgtctcactagtaccctcgcagacggacagcgccagggagcaatggcagcgcgccgaccgcgatgggctgtggccaatagcggctgctcagcagggcgcgccgagagcagcggccgggaaggggcggtgcgggaggcggggtgtggggcggtagtgtgggccctgttcctgcccgcgcggtgttccgcattctgcaagcctccggagcgcacgtcggcagtcggctccctcgttgaccgaatcaccgacctctctccccaggacccagctttcttgtacaaagtgggccaccatggtgagcaagggcgaggagctgttcaccggggtggtgcccatcctggtcgagctggacggcgacgtaaacggccacaagttcagcgtgtccggcgagggcgagggcgatgccacctacggcaagctgaccctgaagttcatctgcaccaccggcaagctgcccgtgccctggcccaccctcgtgaccaccctgacctacggcgtgcagtgcttcagccgctaccccgaccacatgaagcagcacgacttcttcaagtccgccatgcccgaaggctacgtccaggagcgcaccatcttcttcaaggacgacggcaactacaagacccgcgccgaggtgaagttcgagggcgacaccctggtgaaccgcatcgagctgaagggcatcgacttcaaggaggacggcaacatcctggggcacaagctggagtacaactacaacagccacaacgtctatatcatggccgacaagcagaagaacggcatcaaggtgaacttcaagatccgccacaacatcgaggacggcagcgtgcagctcgccgaccactaccagcagaacacccccatcggcgacggccccgtgctgctgcccgacaaccactacctgagcacccagtccgccctgagcaaagaccccaacgagaagcgcgatcacatggtcctgctggagttcgtgaccgccgccgggatcactctcggcatggacgagctgtacaagggaagcggagagggcaggggaagtcttctaacatgcggggacgtggaggaaaatcccggccccatgaccgagtacaagcccacggtgcgcctcgccacccgcgacgacgtccccagggccgtacgcaccctcgccgccgcgttcgccgactaccccgccacgcgccacaccgtcgatccggaccgccacatcgagcgggtcaccgagctgcaagaactcttcctcacgcgcgtcgggctcgacatcggcaaggtgtgggtcgcggacgacggcgccgcggtggcggtctggaccacgccggagagcgtcgaagcgggggcggtgttcgccgagatcggcccgcgcatggccgagttgagcggttcccggctggccgcgcagcaacagatggaaggcctcctggcgccgcaccggcccaaggagcccgcgtggttcctggccaccgtcggcgtctcgcccgaccaccagggcaagggtctgggcagcgccgtcgtgctccccggagtggaggcggccgagcgcgccggggtgcccgccttcctggagacctccgcgccccgcaacctccccttctacgagcggctcggcttcaccgtcaccgccgacgtcgaggtgcccgaaggaccgcgcacctggtgcatgacccgcaagcccggtgcctgacaactttattatacatagttgatggccggccgcttcgagcagacatgataagatacattgatgagtttggacaaaccacaactagaatgcagtgaaaaaaatgctttatttgtgaaatttgtgatgctattgctttatttgtaaccattataagctgcaataaacaagttaacaacaacaattgcattcattttatgtttcaggttcagggggaggtgtgggaggttttttaaagcaagtaaaacctctacaaatgtggtagcggccgcggcgctcttccgcttcctcgctcactgactcgctgcgctcggtcgttcggctgcggcgagcggtatcagctcactcaaaggcggtaatacggttatccacagaatcaggggataacgcaggaaagaacatgtgagcaaaaggccagcaaaaggccaggaaccgtaaaaaggccgcgttgctggcgtttttccataggctccgcccccctgacgagcatcacaaaaatcgacgctcaagtcagaggtggcgaaacccgacaggactataaagataccaggcgtttccccctggaagctccctcgtgcgctctcctgttccgaccctgccgcttaccggatacctgtccgcctttctctcttcgggaagcgtggcgctttctcatagctcacgctgtaggtatctcagttcggtgtaggtcgttcgctccaagctgggctgtgtgcacgaaccccccgttcagcccgaccgctgcgccttatccggtaactatcgtcttgagtccaacccggtaagacacgacttatcgccactggcagcagccactggtaacaggattagcagagcgaggtatgtaggcggtgctacagagttcttgaagtggtggcctaactacggctacactagaagaacagtatttggtatctgcgctctgctgaagccagttaccttcggaaaaagagttggtagctcttgatccggcaaacaaaccaccgctggtagcggtggtttttttgtttgcaagcagcagattacgcgcagaaaaaaaggatctcaagaagatcctttgatcttttctacggggtctgacgctcagtggaacgaaaactcacgttaagggattttggtcatgagattatcaaaaaggatcttcacctagatccttttaaattaaaaatgaagttttaaatcaatctaaagtatatatgagtaaacttggtctgacagttaccaatgcttaatcagtgaggcacctatctcagcgatctgtctatttcgttcatccatagttgcctgactccccgtcgtgtagataactacgatacgggagggcttaccatctggccccagtgctgcaatgataccgcgagacccacgctcaccggctccagatttatcagcaataaaccagccagccggaagggccgagcgcagaagtggtcctgcaactttatccgcctccatccagtctattaattgttgccgggaagctagagtaagtagttcgccagttaatagtttgcgcaacgttgttgccattgctacaggcatcgtggtgtcacgctcgtcgtttggtatggcttcattcagctccggttcccaacgatcaaggcgagttacatgatcccccatgttgtgcaaaaaagcggttagctccttcggtcctccgatcgttgtcagaagtaagttggccgcagtgttatcactcatggttatggcagcactgcataattctcttactgtcatgccatccgtaagatgcttttctgtgactggtgagtactcaaccaagtcattctgagaatagtgtatgcggcgaccgagttgctcttgcccggcgtcaatacgggataataccgcgccacatagcagaactttaaaagtgctcatcattggaaaacgttcttcggggcgaaaactctcaaggatcttaccgctgttgagatccagttcgatgtaacccactcgtgcacccaactgatcttcagcatcttttactttcaccagcgtttctgggtgagcaaaaacaggaaggcaaaatgccgcaaaaaagggaataagggcgacacggaaatgttgaatactcatactcttcctttttcaatattattgaagcatttatcagggttattgtctcatgagcggatacatatttgaatgtatttagaaaaataaacaaataggggttccgcgcacatttccccgaaaagtgccacctgacgtctaagaaaccattattatcatgacattaacctataaaaataggcgtatcacgaggccctttcgtcggcgcgccgcggccgc

SEQ ID NO: 710 - DNA, 4624 bp, synthetic construct
  source 1..4624: mol_type = other DNA
caactttgtatagaaaagttggagggcctatttcccatgattccttcatatttgcatatacgatacaaggctgttagagagataattggaattaatttgactgtaaacacaaagatattagtacaaaatacgtgacgtagaaagtaataatttcttgggtagtttgcagttttaaaattatgttttaaaatggactatcatatgcttaccgtaacttgaaagtatttcgatttcttggctttatatatcttgtggaaaggacgaaacaccgtgcacacctcctggcgggcagctctgctgctgctaaagcagctgctgtgttctggcaatacctgcagcagcagcaaaagcagcagcagggaggcctgccctgactgcccactttttgtttttcaagtttgtacaaaaaagcaggctgggttgcgccttttccaaggcagccctgggtttgcgcagggacgcggctgctctgggcgtggttccgggaaacgcagcggcgccgaccctgggtctcgcacattcttcacgtccgttcgcagcgtcacccggatcttcgccgctacccttgtgggccccccggcgacgcttcctgctccgcccctaagtcgggaaggttccttgcggttcgcggcgtgccggacgtgacaaacggaagccgcacgtctcactagtaccctcgcagacggacagcgccagggagcaatggcagcgcgccgaccgcgatgggctgtggccaatagcggctgctcagcagggcgcgccgagagcagcggccgggaaggggcggtgcgggaggcggggtgtggggcggtagtgtgggccctgttcctgcccgcgcggtgttccgcattctgcaagcctccggagcgcacgtcggcagtcggctccctcgttgaccgaatcaccgacctctctccccaggacccagctttcttgtacaaagtgggccaccatggtgagcaagggcgaggagctgttcaccggggtggtgcccatcctggtcgagctggacggcgacgtaaacggccacaagttcagcgtgtccggcgagggcgagggcgatgccacctacggcaagctgaccctgaagttcatctgcaccaccggcaagctgcccgtgccctggcccaccctcgtgaccaccctgacctacggcgtgcagtgcttcagccgctaccccgaccacatgaagcagcacgacttcttcaagtccgccatgcccgaaggctacgtccaggagcgcaccatcttcttcaaggacgacggcaactacaagacccgcgccgaggtgaagttcgagggcgacaccctggtgaaccgcatcgagctgaagggcatcgacttcaaggaggacggcaacatcctggggcacaagctggagtacaactacaacagccacaacgtctatatcatggccgacaagcagaagaacggcatcaaggtgaacttcaagatccgccacaacatcgaggacggcagcgtgcagctcgccgaccactaccagcagaacacccccatcggcgacggccccgtgctgctgcccgacaaccactacctgagcacccagtccgccctgagcaaagaccccaacgagaagcgcgatcacatggtcctgctggagttcgtgaccgccgccgggatcactctcggcatggacgagctgtacaagggaagcggagagggcaggggaagtcttctaacatgcggggacgtggaggaaaatcccggccccatgaccgagtacaagcccacggtgcgcctcgccacccgcgacgacgtccccagggccgtacgcaccctcgccgccgcgttcgccgactaccccgccacgcgccacaccgtcgatccggaccgccacatcgagcgggtcaccgagctgcaagaactcttcctcacgcgcgtcgggctcgacatcggcaaggtgtgggtcgcggacgacggcgccgcggtggcggtctggaccacgccggagagcgtcgaagcgggggcggtgttcgccgagatcggcccgcgcatggccgagttgagcggttcccggctggccgcgcagcaacagatggaaggcctcctggcgccgcaccggcccaaggagcccgcgtggttcctggccaccgtcggcgtctcgcccgaccaccagggcaagggtctgggcagcgccgtcgtgctccccggagtggaggcggccgagcgcgccggggtgcccgccttcctggagacctccgcgccccgcaacctccccttctacgagcggctcggcttcaccgtcaccgccgacgtcgaggtgcccgaaggaccgcgcacctggtgcatgacccgcaagcccggtgcctgacaactttattatacatagttgatggccggccgcttcgagcagacatgataagatacattgatgagtttggacaaaccacaactagaatgcagtgaaaaaaatgctttatttgtgaaatttgtgatgctattgctttatttgtaaccattataagctgcaataaacaagttaacaacaacaattgcattcattttatgtttcaggttcagggggaggtgtgggaggttttttaaagcaagtaaaacctctacaaatgtggtagcggccgcggcgctcttccgcttcctcgctcactgactcgctgcgctcggtcgttcggctgcggcgagcggtatcagctcactcaaaggcggtaatacggttatccacagaatcaggggataacgcaggaaagaacatgtgagcaaaaggccagcaaaaggccaggaaccgtaaaaaggccgcgttgctggcgtttttccataggctccgcccccctgacgagcatcacaaaaatcgacgctcaagtcagaggtggcgaaacccgacaggactataaagataccaggcgtttccccctggaagctccctcgtgcgctctcctgttccgaccctgccgcttaccggatacctgtccgcctttctctcttcgggaagcgtggcgctttctcatagctcacgctgtaggtatctcagttcggtgtaggtcgttcgctccaagctgggctgtgtgcacgaaccccccgttcagcccgaccgctgcgccttatccggtaactatcgtcttgagtccaacccggtaagacacgacttatcgccactggcagcagccactggtaacaggattagcagagcgaggtatgtaggcggtgctacagagttcttgaagtggtggcctaactacggctacactagaagaacagtatttggtatctgcgctctgctgaagccagttaccttcggaaaaagagttggtagctcttgatccggcaaacaaaccaccgctggtagcggtggtttttttgtttgcaagcagcagattacgcgcagaaaaaaaggatctcaagaagatcctttgatcttttctacggggtctgacgctcagtggaacgaaaactcacgttaagggattttggtcatgagattatcaaaaaggatcttcacctagatccttttaaattaaaaatgaagttttaaatcaatctaaagtatatatgagtaaacttggtctgacagttaccaatgcttaatcagtgaggcacctatctcagcgatctgtctatttcgttcatccatagttgcctgactccccgtcgtgtagataactacgatacgggagggcttaccatctggccccagtgctgcaatgataccgcgagacccacgctcaccggctccagatttatcagcaataaaccagccagccggaagggccgagcgcagaagtggtcctgcaactttatccgcctccatccagtctattaattgttgccgggaagctagagtaagtagttcgccagttaatagtttgcgcaacgttgttgccattgctacaggcatcgtggtgtcacgctcgtcgtttggtatggcttcattcagctccggttcccaacgatcaaggcgagttacatgatcccccatgttgtgcaaaaaagcggttagctccttcggtcctccgatcgttgtcagaagtaagttggccgcagtgttatcactcatggttatggcagcactgcataattctcttactgtcatgccatccgtaagatgcttttctgtgactggtgagtactcaaccaagtcattctgagaatagtgtatgcggcgaccgagttgctcttgcccggcgtcaatacgggataataccgcgccacatagcagaactttaaaagtgctcatcattggaaaacgttcttcggggcgaaaactctcaaggatcttaccgctgttgagatccagttcgatgtaacccactcgtgcacccaactgatcttcagcatcttttactttcaccagcgtttctgggtgagcaaaaacaggaaggcaaaatgccgcaaaaaagggaataagggcgacacggaaatgttgaatactcatactcttcctttttcaatattattgaagcatttatcagggttattgtctcatgagcggatacatatttgaatgtatttagaaaaataaacaaataggggttccgcgcacatttccccgaaaagtgccacctgacgtctaagaaaccattattatcatgacattaacctataaaaataggcgtatcacgaggccctttcgtcggcgcgccgcggccgc

SEQ ID NO: 711 - DNA, 4624 bp, synthetic construct
  source 1..4624: mol_type = other DNA
caactttgtatagaaaagttggagggcctatttcccatgattccttcatatttgcatatacgatacaaggctgttagagagataattggaattaatttgactgtaaacacaaagatattagtacaaaatacgtgacgtagaaagtaataatttcttgggtagtttgcagttttaaaattatgttttaaaatggactatcatatgcttaccgtaacttgaaagtatttcgatttcttggctttatatatcttgtggaaaggacgaaacaccgtgcacacctcctggcgggcagctctgctgctgctaaagctactgctgtgttctggcaatacctgcagcagaagcaaaagcagcagcagggaggcctgccctgactgcccactttttgtttttcaagtttgtacaaaaaagcaggctgggttgcgccttttccaaggcagccctgggtttgcgcagggacgcggctgctctgggcgtggttccgggaaacgcagcggcgccgaccctgggtctcgcacattcttcacgtccgttcgcagcgtcacccggatcttcgccgctacccttgtgggccccccggcgacgcttcctgctccgcccctaagtcgggaaggttccttgcggttcgcggcgtgccggacgtgacaaacggaagccgcacgtctcactagtaccctcgcagacggacagcgccagggagcaatggcagcgcgccgaccgcgatgggctgtggccaatagcggctgctcagcagggcgcgccgagagcagcggccgggaaggggcggtgcgggaggcggggtgtggggcggtagtgtgggccctgttcctgcccgcgcggtgttccgcattctgcaagcctccggagcgcacgtcggcagtcggctccctcgttgaccgaatcaccgacctctctccccaggacccagctttcttgtacaaagtgggccaccatggtgagcaagggcgaggagctgttcaccggggtggtgcccatcctggtcgagctggacggcgacgtaaacggccacaagttcagcgtgtccggcgagggcgagggcgatgccacctacggcaagctgaccctgaagttcatctgcaccaccggcaagctgcccgtgccctggcccaccctcgtgaccaccctgacctacggcgtgcagtgcttcagccgctaccccgaccacatgaagcagcacgacttcttcaagtccgccatgcccgaaggctacgtccaggagcgcaccatcttcttcaaggacgacggcaactacaagacccgcgccgaggtgaagttcgagggcgacaccctggtgaaccgcatcgagctgaagggcatcgacttcaaggaggacggcaacatcctggggcacaagctggagtacaactacaacagccacaacgtctatatcatggccgacaagcagaagaacggcatcaaggtgaacttcaagatccgccacaacatcgaggacggcagcgtgcagctcgccgaccactaccagcagaacacccccatcggcgacggccccgtgctgctgcccgacaaccactacctgagcacccagtccgccctgagcaaagaccccaacgagaagcgcgatcacatggtcctgctggagttcgtgaccgccgccgggatcactctcggcatggacgagctgtacaagggaagcggagagggcaggggaagtcttctaacatgcggggacgtggaggaaaatcccggccccatgaccgagtacaagcccacggtgcgcctcgccacccgcgacgacgtccccagggccgtacgcaccctcgccgccgcgttcgccgactaccccgccacgcgccacaccgtcgatccggaccgccacatcgagcgggtcaccgagctgcaagaactcttcctcacgcgcgtcgggctcgacatcggcaaggtgtgggtcgcggacgacggcgccgcggtggcggtctggaccacgccggagagcgtcgaagcgggggcggtgttcgccgagatcggcccgcgcatggccgagttgagcggttcccggctggccgcgcagcaacagatggaaggcctcctggcgccgcaccggcccaaggagcccgcgtggttcctggccaccgtcggcgtctcgcccgaccaccagggcaagggtctgggcagcgccgtcgtgctccccggagtggaggcggccgagcgcgccggggtgcccgccttcctggagacctccgcgccccgcaacctccccttctacgagcggctcggcttcaccgtcaccgccgacgtcgaggtgcccgaaggaccgcgcacctggtgcatgacccgcaagcccggtgcctgacaactttattatacatagttgatggccggccgcttcgagcagacatgataagatacattgatgagtttggacaaaccacaactagaatgcagtgaaaaaaatgctttatttgtgaaatttgtgatgctattgctttatttgtaaccattataagctgcaataaacaagttaacaacaacaattgcattcattttatgtttcaggttcagggggaggtgtgggaggttttttaaagcaagtaaaacctctacaaatgtggtagcggccgcggcgctcttccgcttcctcgctcactgactcgctgcgctcggtcgttcggctgcggcgagcggtatcagctcactcaaaggcggtaatacggttatccacagaatcaggggataacgcaggaaagaacatgtgagcaaaaggccagcaaaaggccaggaaccgtaaaaaggccgcgttgctggcgtttttccataggctccgcccccctgacgagcatcacaaaaatcgacgctcaagtcagaggtggcgaaacccgacaggactataaagataccaggcgtttccccctggaagctccctcgtgcgctctcctgttccgaccctgccgcttaccggatacctgtccgcctttctctcttcgggaagcgtggcgctttctcatagctcacgctgtaggtatctcagttcggtgtaggtcgttcgctccaagctgggctgtgtgcacgaaccccccgttcagcccgaccgctgcgccttatccggtaactatcgtcttgagtccaacccggtaagacacgacttatcgccactggcagcagccactggtaacaggattagcagagcgaggtatgtaggcggtgctacagagttcttgaagtggtggcctaactacggctacactagaagaacagtatttggtatctgcgctctgctgaagccagttaccttcggaaaaagagttggtagctcttgatccggcaaacaaaccaccgctggtagcggtggtttttttgtttgcaagcagcagattacgcgcagaaaaaaaggatctcaagaagatcctttgatcttttctacggggtctgacgctcagtggaacgaaaactcacgttaagggattttggtcatgagattatcaaaaaggatcttcacctagatccttttaaattaaaaatgaagttttaaatcaatctaaagtatatatgagtaaacttggtctgacagttaccaatgcttaatcagtgaggcacctatctcagcgatctgtctatttcgttcatccatagttgcctgactccccgtcgtgtagataactacgatacgggagggcttaccatctggccccagtgctgcaatgataccgcgagacccacgctcaccggctccagatttatcagcaataaaccagccagccggaagggccgagcgcagaagtggtcctgcaactttatccgcctccatccagtctattaattgttgccgggaagctagagtaagtagttcgccagttaatagtttgcgcaacgttgttgccattgctacaggcatcgtggtgtcacgctcgtcgtttggtatggcttcattcagctccggttcccaacgatcaaggcgagttacatgatcccccatgttgtgcaaaaaagcggttagctccttcggtcctccgatcgttgtcagaagtaagttggccgcagtgttatcactcatggttatggcagcactgcataattctcttactgtcatgccatccgtaagatgcttttctgtgactggtgagtactcaaccaagtcattctgagaatagtgtatgcggcgaccgagttgctcttgcccggcgtcaatacgggataataccgcgccacatagcagaactttaaaagtgctcatcattggaaaacgttcttcggggcgaaaactctcaaggatcttaccgctgttgagatccagttcgatgtaacccactcgtgcacccaactgatcttcagcatcttttactttcaccagcgtttctgggtgagcaaaaacaggaaggcaaaatgccgcaaaaaagggaataagggcgacacggaaatgttgaatactcatactcttcctttttcaatattattgaagcatttatcagggttattgtctcatgagcggatacatatttgaatgtatttagaaaaataaacaaataggggttccgcgcacatttccccgaaaagtgccacctgacgtctaagaaaccattattatcatgacattaacctataaaaataggcgtatcacgaggccctttcgtcggcgcgccgcggccgc

SEQ ID NO: 712 - DNA, 4624 bp, synthetic construct
  source 1..4624: mol_type = other DNA
caactttgtatagaaaagttggagggcctatttcccatgattccttcatatttgcatatacgatacaaggctgttagagagataattggaattaatttgactgtaaacacaaagatattagtacaaaatacgtgacgtagaaagtaataatttcttgggtagtttgcagttttaaaattatgttttaaaatggactatcatatgcttaccgtaacttgaaagtatttcgatttcttggctttatatatcttgtggaaaggacgaaacaccgtgcacacctcctggcgggcagctctgctgctgctaaagctgatgctgtgttctggcaatacctgcagcaacagcaaaagcagcagcagggaggcctgccctgactgcccactttttgtttttcaagtttgtacaaaaaagcaggctgggttgcgccttttccaaggcagccctgggtttgcgcagggacgcggctgctctgggcgtggttccgggaaacgcagcggcgccgaccctgggtctcgcacattcttcacgtccgttcgcagcgtcacccggatcttcgccgctacccttgtgggccccccggcgacgcttcctgctccgcccctaagtcgggaaggttccttgcggttcgcggcgtgccggacgtgacaaacggaagccgcacgtctcactagtaccctcgcagacggacagcgccagggagcaatggcagcgcgccgaccgcgatgggctgtggccaatagcggctgctcagcagggcgcgccgagagcagcggccgggaaggggcggtgcgggaggcggggtgtggggcggtagtgtgggccctgttcctgcccgcgcggtgttccgcattctgcaagcctccggagcgcacgtcggcagtcggctccctcgttgaccgaatcaccgacctctctccccaggacccagctttcttgtacaaagtgggccaccatggtgagcaagggcgaggagctgttcaccggggtggtgcccatcctggtcgagctggacggcgacgtaaacggccacaagttcagcgtgtccggcgagggcgagggcgatgccacctacggcaagctgaccctgaagttcatctgcaccaccggcaagctgcccgtgccctggcccaccctcgtgaccaccctgacctacggcgtgcagtgcttcagccgctaccccgaccacatgaagcagcacgacttcttcaagtccgccatgcccgaaggctacgtccaggagcgcaccatcttcttcaaggacgacggcaactacaagacccgcgccgaggtgaagttcgagggcgacaccctggtgaaccgcatcgagctgaagggcatcgacttcaaggaggacggcaacatcctggggcacaagctggagtacaactacaacagccacaacgtctatatcatggccgacaagcagaagaacggcatcaaggtgaacttcaagatccgccacaacatcgaggacggcagcgtgcagctcgccgaccactaccagcagaacacccccatcggcgacggccccgtgctgctgcccgacaaccactacctgagcacccagtccgccctgagcaaagaccccaacgagaagcgcgatcacatggtcctgctggagttcgtgaccgccgccgggatcactctcggcatggacgagctgtacaagggaagcggagagggcaggggaagtcttctaacatgcggggacgtggaggaaaatcccggccccatgaccgagtacaagcccacggtgcgcctcgccacccgcgacgacgtccccagggccgtacgcaccctcgccgccgcgttcgccgactaccccgccacgcgccacaccgtcgatccggaccgccacatcgagcgggtcaccgagctgcaagaactcttcctcacgcgcgtcgggctcgacatcggcaaggtgtgggtcgcggacgacggcgccgcggtggcggtctggaccacgccggagagcgtcgaagcgggggcggtgttcgccgagatcggcccgcgcatggccgagttgagcggttcccggctggccgcgcagcaacagatggaaggcctcctggcgccgcaccggcccaaggagcccgcgtggttcctggccaccgtcggcgtctcgcccgaccaccagggcaagggtctgggcagcgccgtcgtgctccccggagtggaggcggccgagcgcgccggggtgcccgccttcctggagacctccgcgccccgcaacctccccttctacgagcggctcggcttcaccgtcaccgccgacgtcgaggtgcccgaaggaccgcgcacctggtgcatgacccgcaagcccggtgcctgacaactttattatacatagttgatggccggccgcttcgagcagacatgataagatacattgatgagtttggacaaaccacaactagaatgcagtgaaaaaaatgctttatttgtgaaatttgtgatgctattgctttatttgtaaccattataagctgcaataaacaagttaacaacaacaattgcattcattttatgtttcaggttcagggggaggtgtgggaggttttttaaagcaagtaaaacctctacaaatgtggtagcggccgcggcgctcttccgcttcctcgctcactgactcgctgcgctcggtcgttcggctgcggcgagcggtatcagctcactcaaaggcggtaatacggttatccacagaatcaggggataacgcaggaaagaacatgtgagcaaaaggccagcaaaaggccaggaaccgtaaaaaggccgcgttgctggcgtttttccataggctccgcccccctgacgagcatcacaaaaatcgacgctcaagtcagaggtggcgaaacccgacaggactataaagataccaggcgtttccccctggaagctccctcgtgcgctctcctgttccgaccctgccgcttaccggatacctgtccgcctttctctcttcgggaagcgtggcgctttctcatagctcacgctgtaggtatctcagttcggtgtaggtcgttcgctccaagctgggctgtgtgcacgaaccccccgttcagcccgaccgctgcgccttatccggtaactatcgtcttgagtccaacccggtaagacacgacttatcgccactggcagcagccactggtaacaggattagcagagcgaggtatgtaggcggtgctacagagttcttgaagtggtggcctaactacggctacactagaagaacagtatttggtatctgcgctctgctgaagccagttaccttcggaaaaagagttggtagctcttgatccggcaaacaaaccaccgctggtagcggtggtttttttgtttgcaagcagcagattacgcgcagaaaaaaaggatctcaagaagatcctttgatcttttctacggggtctgacgctcagtggaacgaaaactcacgttaagggattttggtcatgagattatcaaaaaggatcttcacctagatccttttaaattaaaaatgaagttttaaatcaatctaaagtatatatgagtaaacttggtctgacagttaccaatgcttaatcagtgaggcacctatctcagcgatctgtctatttcgttcatccatagttgcctgactccccgtcgtgtagataactacgatacgggagggcttaccatctggccccagtgctgcaatgataccgcgagacccacgctcaccggctccagatttatcagcaataaaccagccagccggaagggccgagcgcagaagtggtcctgcaactttatccgcctccatccagtctattaattgttgccgggaagctagagtaagtagttcgccagttaatagtttgcgcaacgttgttgccattgctacaggcatcgtggtgtcacgctcgtcgtttggtatggcttcattcagctccggttcccaacgatcaaggcgagttacatgatcccccatgttgtgcaaaaaagcggttagctccttcggtcctccgatcgttgtcagaagtaagttggccgcagtgttatcactcatggttatggcagcactgcataattctcttactgtcatgccatccgtaagatgcttttctgtgactggtgagtactcaaccaagtcattctgagaatagtgtatgcggcgaccgagttgctcttgcccggcgtcaatacgggataataccgcgccacatagcagaactttaaaagtgctcatcattggaaaacgttcttcggggcgaaaactctcaaggatcttaccgctgttgagatccagttcgatgtaacccactcgtgcacccaactgatcttcagcatcttttactttcaccagcgtttctgggtgagcaaaaacaggaaggcaaaatgccgcaaaaaagggaataagggcgacacggaaatgttgaatactcatactcttcctttttcaatattattgaagcatttatcagggttattgtctcatgagcggatacatatttgaatgtatttagaaaaataaacaaataggggttccgcgcacatttccccgaaaagtgccacctgacgtctaagaaaccattattatcatgacattaacctataaaaataggcgtatcacgaggccctttcgtcggcgcgccgcggccgc

SEQ ID NO: 713 - DNA, 4624 bp, synthetic construct
  source 1..4624: mol_type = other DNA
caactttgtatagaaaagttggagggcctatttcccatgattccttcatatttgcatatacgatacaaggctgttagagagataattggaattaatttgactgtaaacacaaagatattagtacaaaatacgtgacgtagaaagtaataatttcttgggtagtttgcagttttaaaattatgttttaaaatggactatcatatgcttaccgtaacttgaaagtatttcgatttcttggctttatatatcttgtggaaaggacgaaacaccgtgcacacctcctggcgggcagctctgctgctgctaataatgctgctgtgttctggcaatacctgcagcagcaaaaaaagcagcagcagggaggcctgccctgactgcccactttttgtttttcaagtttgtacaaaaaagcaggctgggttgcgccttttccaaggcagccctgggtttgcgcagggacgcggctgctctgggcgtggttccgggaaacgcagcggcgccgaccctgggtctcgcacattcttcacgtccgttcgcagcgtcacccggatcttcgccgctacccttgtgggccccccggcgacgcttcctgctccgcccctaagtcgggaaggttccttgcggttcgcggcgtgccggacgtgacaaacggaagccgcacgtctcactagtaccctcgcagacggacagcgccagggagcaatggcagcgcgccgaccgcgatgggctgtggccaatagcggctgctcagcagggcgcgccgagagcagcggccgggaaggggcggtgcgggaggcggggtgtggggcggtagtgtgggccctgttcctgcccgcgcggtgttccgcattctgcaagcctccggagcgcacgtcggcagtcggctccctcgttgaccgaatcaccgacctctctccccaggacccagctttcttgtacaaagtgggccaccatggtgagcaagggcgaggagctgttcaccggggtggtgcccatcctggtcgagctggacggcgacgtaaacggccacaagttcagcgtgtccggcgagggcgagggcgatgccacctacggcaagctgaccctgaagttcatctgcaccaccggcaagctgcccgtgccctggcccaccctcgtgaccaccctgacctacggcgtgcagtgcttcagccgctaccccgaccacatgaagcagcacgacttcttcaagtccgccatgcccgaaggctacgtccaggagcgcaccatcttcttcaaggacgacggcaactacaagacccgcgccgaggtgaagttcgagggcgacaccctggtgaaccgcatcgagctgaagggcatcgacttcaaggaggacggcaacatcctggggcacaagctggagtacaactacaacagccacaacgtctatatcatggccgacaagcagaagaacggcatcaaggtgaacttcaagatccgccacaacatcgaggacggcagcgtgcagctcgccgaccactaccagcagaacacccccatcggcgacggccccgtgctgctgcccgacaaccactacctgagcacccagtccgccctgagcaaagaccccaacgagaagcgcgatcacatggtcctgctggagttcgtgaccgccgccgggatcactctcggcatggacgagctgtacaagggaagcggagagggcaggggaagtcttctaacatgcggggacgtggaggaaaatcccggccccatgaccgagtacaagcccacggtgcgcctcgccacccgcgacgacgtccccagggccgtacgcaccctcgccgccgcgttcgccgactaccccgccacgcgccacaccgtcgatccggaccgccacatcgagcgggtcaccgagctgcaagaactcttcctcacgcgcgtcgggctcgacatcggcaaggtgtgggtcgcggacgacggcgccgcggtggcggtctggaccacgccggagagcgtcgaagcgggggcggtgttcgccgagatcggcccgcgcatggccgagttgagcggttcccggctggccgcgcagcaacagatggaaggcctcctggcgccgcaccggcccaaggagcccgcgtggttcctggccaccgtcggcgtctcgcccgaccaccagggcaagggtctgggcagcgccgtcgtgctccccggagtggaggcggccgagcgcgccggggtgcccgccttcctggagacctccgcgccccgcaacctccccttctacgagcggctcggcttcaccgtcaccgccgacgtcgaggtgcccgaaggaccgcgcacctggtgcatgacccgcaagcccggtgcctgacaactttattatacatagttgatggccggccgcttcgagcagacatgataagatacattgatgagtttggacaaaccacaactagaatgcagtgaaaaaaatgctttatttgtgaaatttgtgatgctattgctttatttgtaaccattataagctgcaataaacaagttaacaacaacaattgcattcattttatgtttcaggttcagggggaggtgtgggaggttttttaaagcaagtaaaacctctacaaatgtggtagcggccgcggcgctcttccgcttcctcgctcactgactcgctgcgctcggtcgttcggctgcggcgagcggtatcagctcactcaaaggcggtaatacggttatccacagaatcaggggataacgcaggaaagaacatgtgagcaaaaggccagcaaaaggccaggaaccgtaaaaaggccgcgttgctggcgtttttccataggctccgcccccctgacgagcatcacaaaaatcgacgctcaagtcagaggtggcgaaacccgacaggactataaagataccaggcgtttccccctggaagctccctcgtgcgctctcctgttccgaccctgccgcttaccggatacctgtccgcctttctctcttcgggaagcgtggcgctttctcatagctcacgctgtaggtatctcagttcggtgtaggtcgttcgctccaagctgggctgtgtgcacgaaccccccgttcagcccgaccgctgcgccttatccggtaactatcgtcttgagtccaacccggtaagacacgacttatcgccactggcagcagccactggtaacaggattagcagagcgaggtatgtaggcggtgctacagagttcttgaagtggtggcctaactacggctacactagaagaacagtatttggtatctgcgctctgctgaagccagttaccttcggaaaaagagttggtagctcttgatccggcaaacaaaccaccgctggtagcggtggtttttttgtttgcaagcagcagattacgcgcagaaaaaaaggatctcaagaagatcctttgatcttttctacggggtctgacgctcagtggaacgaaaactcacgttaagggattttggtcatgagattatcaaaaaggatcttcacctagatccttttaaattaaaaatgaagttttaaatcaatctaaagtatatatgagtaaacttggtctgacagttaccaatgcttaatcagtgaggcacctatctcagcgatctgtctatttcgttcatccatagttgcctgactccccgtcgtgtagataactacgatacgggagggcttaccatctggccccagtgctgcaatgataccgcgagacccacgctcaccggctccagatttatcagcaataaaccagccagccggaagggccgagcgcagaagtggtcctgcaactttatccgcctccatccagtctattaattgttgccgggaagctagagtaagtagttcgccagttaatagtttgcgcaacgttgttgccattgctacaggcatcgtggtgtcacgctcgtcgtttggtatggcttcattcagctccggttcccaacgatcaaggcgagttacatgatcccccatgttgtgcaaaaaagcggttagctccttcggtcctccgatcgttgtcagaagtaagttggccgcagtgttatcactcatggttatggcagcactgcataattctcttactgtcatgccatccgtaagatgcttttctgtgactggtgagtactcaaccaagtcattctgagaatagtgtatgcggcgaccgagttgctcttgcccggcgtcaatacgggataataccgcgccacatagcagaactttaaaagtgctcatcattggaaaacgttcttcggggcgaaaactctcaaggatcttaccgctgttgagatccagttcgatgtaacccactcgtgcacccaactgatcttcagcatcttttactttcaccagcgtttctgggtgagcaaaaacaggaaggcaaaatgccgcaaaaaagggaataagggcgacacggaaatgttgaatactcatactcttcctttttcaatattattgaagcatttatcagggttattgtctcatgagcggatacatatttgaatgtatttagaaaaataaacaaataggggttccgcgcacatttccccgaaaagtgccacctgacgtctaagaaaccattattatcatgacattaacctataaaaataggcgtatcacgaggccctttcgtcggcgcgccgcggccgc

SEQ ID NO: 714 - DNA, 4624 bp, synthetic construct
  source 1..4624: mol_type = other DNA
caactttgtatagaaaagttggagggcctatttcccatgattccttcatatttgcatatacgatacaaggctgttagagagataattggaattaatttgactgtaaacacaaagatattagtacaaaatacgtgacgtagaaagtaataatttcttgggtagtttgcagttttaaaattatgttttaaaatggactatcatatgcttaccgtaacttgaaagtatttcgatttcttggctttatatatcttgtggaaaggacgaaacaccgtgcacacctcctggcgggcagctctgctgctgctaatacagctgctgtgttctggcaatacctgcagcagcagaaaaagcagcagcagggaggcctgccctgactgcccactttttgtttttcaagtttgtacaaaaaagcaggctgggttgcgccttttccaaggcagccctgggtttgcgcagggacgcggctgctctgggcgtggttccgggaaacgcagcggcgccgaccctgggtctcgcacattcttcacgtccgttcgcagcgtcacccggatcttcgccgctacccttgtgggccccccggcgacgcttcctgctccgcccctaagtcgggaaggttccttgcggttcgcggcgtgccggacgtgacaaacggaagccgcacgtctcactagtaccctcgcagacggacagcgccagggagcaatggcagcgcgccgaccgcgatgggctgtggccaatagcggctgctcagcagggcgcgccgagagcagcggccgggaaggggcggtgcgggaggcggggtgtggggcggtagtgtgggccctgttcctgcccgcgcggtgttccgcattctgcaagcctccggagcgcacgtcggcagtcggctccctcgttgaccgaatcaccgacctctctccccaggacccagctttcttgtacaaagtgggccaccatggtgagcaagggcgaggagctgttcaccggggtggtgcccatcctggtcgagctggacggcgacgtaaacggccacaagttcagcgtgtccggcgagggcgagggcgatgccacctacggcaagctgaccctgaagttcatctgcaccaccggcaagctgcccgtgccctggcccaccctcgtgaccaccctgacctacggcgtgcagtgcttcagccgctaccccgaccacatgaagcagcacgacttcttcaagtccgccatgcccgaaggctacgtccaggagcgcaccatcttcttcaaggacgacggcaactacaagacccgcgccgaggtgaagttcgagggcgacaccctggtgaaccgcatcgagctgaagggcatcgacttcaaggaggacggcaacatcctggggcacaagctggagtacaactacaacagccacaacgtctatatcatggccgacaagcagaagaacggcatcaaggtgaacttcaagatccgccacaacatcgaggacggcagcgtgcagctcgccgaccactaccagcagaacacccccatcggcgacggccccgtgctgctgcccgacaaccactacctgagcacccagtccgccctgagcaaagaccccaacgagaagcgcgatcacatggtcctgctggagttcgtgaccgccgccgggatcactctcggcatggacgagctgtacaagggaagcggagagggcaggggaagtcttctaacatgcggggacgtggaggaaaatcccggccccatgaccgagtacaagcccacggtgcgcctcgccacccgcgacgacgtccccagggccgtacgcaccctcgccgccgcgttcgccgactaccccgccacgcgccacaccgtcgatccggaccgccacatcgagcgggtcaccgagctgcaagaactcttcctcacgcgcgtcgggctcgacatcggcaaggtgtgggtcgcggacgacggcgccgcggtggcggtctggaccacgccggagagcgtcgaagcgggggcggtgttcgccgagatcggcccgcgcatggccgagttgagcggttcccggctggccgcgcagcaacagatggaaggcctcctggcgccgcaccggcccaaggagcccgcgtggttcctggccaccgtcggcgtctcgcccgaccaccagggcaagggtctgggcagcgccgtcgtgctccccggagtggaggcggccgagcgcgccggggtgcccgccttcctggagacctccgcgccccgcaacctccccttctacgagcggctcggcttcaccgtcaccgccgacgtcgaggtgcccgaaggaccgcgcacctggtgcatgacccgcaagcccggtgcctgacaactttattatacatagttgatggccggccgcttcgagcagacatgataagatacattgatgagtttggacaaaccacaactagaatgcagtgaaaaaaatgctttatttgtgaaatttgtgatgctattgctttatttgtaaccattataagctgcaataaacaagttaacaacaacaattgcattcattttatgtttcaggttcagggggaggtgtgggaggttttttaaagcaagtaaaacctctacaaatgtggtagcggccgcggcgctcttccgcttcctcgctcactgactcgctgcgctcggtcgttcggctgcggcgagcggtatcagctcactcaaaggcggtaatacggttatccacagaatcaggggataacgcaggaaagaacatgtgagcaaaaggccagcaaaaggccaggaaccgtaaaaaggccgcgttgctggcgtttttccataggctccgcccccctgacgagcatcacaaaaatcgacgctcaagtcagaggtggcgaaacccgacaggactataaagataccaggcgtttccccctggaagctccctcgtgcgctctcctgttccgaccctgccgcttaccggatacctgtccgcctttctctcttcgggaagcgtggcgctttctcatagctcacgctgtaggtatctcagttcggtgtaggtcgttcgctccaagctgggctgtgtgcacgaaccccccgttcagcccgaccgctgcgccttatccggtaactatcgtcttgagtccaacccggtaagacacgacttatcgccactggcagcagccactggtaacaggattagcagagcgaggtatgtaggcggtgctacagagttcttgaagtggtggcctaactacggctacactagaagaacagtatttggtatctgcgctctgctgaagccagttaccttcggaaaaagagttggtagctcttgatccggcaaacaaaccaccgctggtagcggtggtttttttgtttgcaagcagcagattacgcgcagaaaaaaaggatctcaagaagatcctttgatcttttctacggggtctgacgctcagtggaacgaaaactcacgttaagggattttggtcatgagattatcaaaaaggatcttcacctagatccttttaaattaaaaatgaagttttaaatcaatctaaagtatatatgagtaaacttggtctgacagttaccaatgcttaatcagtgaggcacctatctcagcgatctgtctatttcgttcatccatagttgcctgactccccgtcgtgtagataactacgatacgggagggcttaccatctggccccagtgctgcaatgataccgcgagacccacgctcaccggctccagatttatcagcaataaaccagccagccggaagggccgagcgcagaagtggtcctgcaactttatccgcctccatccagtctattaattgttgccgggaagctagagtaagtagttcgccagttaatagtttgcgcaacgttgttgccattgctacaggcatcgtggtgtcacgctcgtcgtttggtatggcttcattcagctccggttcccaacgatcaaggcgagttacatgatcccccatgttgtgcaaaaaagcggttagctccttcggtcctccgatcgttgtcagaagtaagttggccgcagtgttatcactcatggttatggcagcactgcataattctcttactgtcatgccatccgtaagatgcttttctgtgactggtgagtactcaaccaagtcattctgagaatagtgtatgcggcgaccgagttgctcttgcccggcgtcaatacgggataataccgcgccacatagcagaactttaaaagtgctcatcattggaaaacgttcttcggggcgaaaactctcaaggatcttaccgctgttgagatccagttcgatgtaacccactcgtgcacccaactgatcttcagcatcttttactttcaccagcgtttctgggtgagcaaaaacaggaaggcaaaatgccgcaaaaaagggaataagggcgacacggaaatgttgaatactcatactcttcctttttcaatattattgaagcatttatcagggttattgtctcatgagcggatacatatttgaatgtatttagaaaaataaacaaataggggttccgcgcacatttccccgaaaagtgccacctgacgtctaagaaaccattattatcatgacattaacctataaaaataggcgtatcacgaggccctttcgtcggcgcgccgcggccgc

SEQ ID NO: 715 - DNA, 4624 bp, synthetic construct
  source 1..4624: mol_type = other DNA
caactttgtatagaaaagttggagggcctatttcccatgattccttcatatttgcatatacgatacaaggctgttagagagataattggaattaatttgactgtaaacacaaagatattagtacaaaatacgtgacgtagaaagtaataatttcttgggtagtttgcagttttaaaattatgttttaaaatggactatcatatgcttaccgtaacttgaaagtatttcgatttcttggctttatatatcttgtggaaaggacgaaacaccgtgcacacctcctggcgggcagctctgctgctgctaatactactgctgtgttctggcaatacctgcagcagaagaaaaagcagcagcagggaggcctgccctgactgcccactttttgtttttcaagtttgtacaaaaaagcaggctgggttgcgccttttccaaggcagccctgggtttgcgcagggacgcggctgctctgggcgtggttccgggaaacgcagcggcgccgaccctgggtctcgcacattcttcacgtccgttcgcagcgtcacccggatcttcgccgctacccttgtgggccccccggcgacgcttcctgctccgcccctaagtcgggaaggttccttgcggttcgcggcgtgccggacgtgacaaacggaagccgcacgtctcactagtaccctcgcagacggacagcgccagggagcaatggcagcgcgccgaccgcgatgggctgtggccaatagcggctgctcagcagggcgcgccgagagcagcggccgggaaggggcggtgcgggaggcggggtgtggggcggtagtgtgggccctgttcctgcccgcgcggtgttccgcattctgcaagcctccggagcgcacgtcggcagtcggctccctcgttgaccgaatcaccgacctctctccccaggacccagctttcttgtacaaagtgggccaccatggtgagcaagggcgaggagctgttcaccggggtggtgcccatcctggtcgagctggacggcgacgtaaacggccacaagttcagcgtgtccggcgagggcgagggcgatgccacctacggcaagctgaccctgaagttcatctgcaccaccggcaagctgcccgtgccctggcccaccctcgtgaccaccctgacctacggcgtgcagtgcttcagccgctaccccgaccacatgaagcagcacgacttcttcaagtccgccatgcccgaaggctacgtccaggagcgcaccatcttcttcaaggacgacggcaactacaagacccgcgccgaggtgaagttcgagggcgacaccctggtgaaccgcatcgagctgaagggcatcgacttcaaggaggacggcaacatcctggggcacaagctggagtacaactacaacagccacaacgtctatatcatggccgacaagcagaagaacggcatcaaggtgaacttcaagatccgccacaacatcgaggacggcagcgtgcagctcgccgaccactaccagcagaacacccccatcggcgacggccccgtgctgctgcccgacaaccactacctgagcacccagtccgccctgagcaaagaccccaacgagaagcgcgatcacatggtcctgctggagttcgtgaccgccgccgggatcactctcggcatggacgagctgtacaagggaagcggagagggcaggggaagtcttctaacatgcggggacgtggaggaaaatcccggccccatgaccgagtacaagcccacggtgcgcctcgccacccgcgacgacgtccccagggccgtacgcaccctcgccgccgcgttcgccgactaccccgccacgcgccacaccgtcgatccggaccgccacatcgagcgggtcaccgagctgcaagaactcttcctcacgcgcgtcgggctcgacatcggcaaggtgtgggtcgcggacgacggcgccgcggtggcggtctggaccacgccggagagcgtcgaagcgggggcggtgttcgccgagatcggcccgcgcatggccgagttgagcggttcccggctggccgcgcagcaacagatggaaggcctcctggcgccgcaccggcccaaggagcccgcgtggttcctggccaccgtcggcgtctcgcccgaccaccagggcaagggtctgggcagcgccgtcgtgctccccggagtggaggcggccgagcgcgccggggtgcccgccttcctggagacctccgcgccccgcaacctccccttctacgagcggctcggcttcaccgtcaccgccgacgtcgaggtgcccgaaggaccgcgcacctggtgcatgacccgcaagcccggtgcctgacaactttattatacatagttgatggccggccgcttcgagcagacatgataagatacattgatgagtttggacaaaccacaactagaatgcagtgaaaaaaatgctttatttgtgaaatttgtgatgctattgctttatttgtaaccattataagctgcaataaacaagttaacaacaacaattgcattcattttatgtttcaggttcagggggaggtgtgggaggttttttaaagcaagtaaaacctctacaaatgtggtagcggccgcggcgctcttccgcttcctcgctcactgactcgctgcgctcggtcgttcggctgcggcgagcggtatcagctcactcaaaggcggtaatacggttatccacagaatcaggggataacgcaggaaagaacatgtgagcaaaaggccagcaaaaggccaggaaccgtaaaaaggccgcgttgctggcgtttttccataggctccgcccccctgacgagcatcacaaaaatcgacgctcaagtcagaggtggcgaaacccgacaggactataaagataccaggcgtttccccctggaagctccctcgtgcgctctcctgttccgaccctgccgcttaccggatacctgtccgcctttctctcttcgggaagcgtggcgctttctcatagctcacgctgtaggtatctcagttcggtgtaggtcgttcgctccaagctgggctgtgtgcacgaaccccccgttcagcccgaccgctgcgccttatccggtaactatcgtcttgagtccaacccggtaagacacgacttatcgccactggcagcagccactggtaacaggattagcagagcgaggtatgtaggcggtgctacagagttcttgaagtggtggcctaactacggctacactagaagaacagtatttggtatctgcgctctgctgaagccagttaccttcggaaaaagagttggtagctcttgatccggcaaacaaaccaccgctggtagcggtggtttttttgtttgcaagcagcagattacgcgcagaaaaaaaggatctcaagaagatcctttgatcttttctacggggtctgacgctcagtggaacgaaaactcacgttaagggattttggtcatgagattatcaaaaaggatcttcacctagatccttttaaattaaaaatgaagttttaaatcaatctaaagtatatatgagtaaacttggtctgacagttaccaatgcttaatcagtgaggcacctatctcagcgatctgtctatttcgttcatccatagttgcctgactccccgtcgtgtagataactacgatacgggagggcttaccatctggccccagtgctgcaatgataccgcgagacccacgctcaccggctccagatttatcagcaataaaccagccagccggaagggccgagcgcagaagtggtcctgcaactttatccgcctccatccagtctattaattgttgccgggaagctagagtaagtagttcgccagttaatagtttgcgcaacgttgttgccattgctacaggcatcgtggtgtcacgctcgtcgtttggtatggcttcattcagctccggttcccaacgatcaaggcgagttacatgatcccccatgttgtgcaaaaaagcggttagctccttcggtcctccgatcgttgtcagaagtaagttggccgcagtgttatcactcatggttatggcagcactgcataattctcttactgtcatgccatccgtaagatgcttttctgtgactggtgagtactcaaccaagtcattctgagaatagtgtatgcggcgaccgagttgctcttgcccggcgtcaatacgggataataccgcgccacatagcagaactttaaaagtgctcatcattggaaaacgttcttcggggcgaaaactctcaaggatcttaccgctgttgagatccagttcgatgtaacccactcgtgcacccaactgatcttcagcatcttttactttcaccagcgtttctgggtgagcaaaaacaggaaggcaaaatgccgcaaaaaagggaataagggcgacacggaaatgttgaatactcatactcttcctttttcaatattattgaagcatttatcagggttattgtctcatgagcggatacatatttgaatgtatttagaaaaataaacaaataggggttccgcgcacatttccccgaaaagtgccacctgacgtctaagaaaccattattatcatgacattaacctataaaaataggcgtatcacgaggccctttcgtcggcgcgccgcggccgc

SEQ ID NO: 716 - DNA, 4624 bp, synthetic construct
  source 1..4624: mol_type = other DNA
caactttgtatagaaaagttggagggcctatttcccatgattccttcatatttgcatatacgatacaaggctgttagagagataattggaattaatttgactgtaaacacaaagatattagtacaaaatacgtgacgtagaaagtaataatttcttgggtagtttgcagttttaaaattatgttttaaaatggactatcatatgcttaccgtaacttgaaagtatttcgatttcttggctttatatatcttgtggaaaggacgaaacaccgtgcacacctcctggcgggcagctctgctgctgctaatactgatgctgtgttctggcaatacctgcagcaacagaaaaagcagcagcagggaggcctgccctgactgcccactttttgtttttcaagtttgtacaaaaaagcaggctgggttgcgccttttccaaggcagccctgggtttgcgcagggacgcggctgctctgggcgtggttccgggaaacgcagcggcgccgaccctgggtctcgcacattcttcacgtccgttcgcagcgtcacccggatcttcgccgctacccttgtgggccccccggcgacgcttcctgctccgcccctaagtcgggaaggttccttgcggttcgcggcgtgccggacgtgacaaacggaagccgcacgtctcactagtaccctcgcagacggacagcgccagggagcaatggcagcgcgccgaccgcgatgggctgtggccaatagcggctgctcagcagggcgcgccgagagcagcggccgggaaggggcggtgcgggaggcggggtgtggggcggtagtgtgggccctgttcctgcccgcgcggtgttccgcattctgcaagcctccggagcgcacgtcggcagtcggctccctcgttgaccgaatcaccgacctctctccccaggacccagctttcttgtacaaagtgggccaccatggtgagcaagggcgaggagctgttcaccggggtggtgcccatcctggtcgagctggacggcgacgtaaacggccacaagttcagcgtgtccggcgagggcgagggcgatgccacctacggcaagctgaccctgaagttcatctgcaccaccggcaagctgcccgtgccctggcccaccctcgtgaccaccctgacctacggcgtgcagtgcttcagccgctaccccgaccacatgaagcagcacgacttcttcaagtccgccatgcccgaaggctacgtccaggagcgcaccatcttcttcaaggacgacggcaactacaagacccgcgccgaggtgaagttcgagggcgacaccctggtgaaccgcatcgagctgaagggcatcgacttcaaggaggacggcaacatcctggggcacaagctggagtacaactacaacagccacaacgtctatatcatggccgacaagcagaagaacggcatcaaggtgaacttcaagatccgccacaacatcgaggacggcagcgtgcagctcgccgaccactaccagcagaacacccccatcggcgacggccccgtgctgctgcccgacaaccactacctgagcacccagtccgccctgagcaaagaccccaacgagaagcgcgatcacatggtcctgctggagttcgtgaccgccgccgggatcactctcggcatggacgagctgtacaagggaagcggagagggcaggggaagtcttctaacatgcggggacgtggaggaaaatcccggccccatgaccgagtacaagcccacggtgcgcctcgccacccgcgacgacgtccccagggccgtacgcaccctcgccgccgcgttcgccgactaccccgccacgcgccacaccgtcgatccggaccgccacatcgagcgggtcaccgagctgcaagaactcttcctcacgcgcgtcgggctcgacatcggcaaggtgtgggtcgcggacgacggcgccgcggtggcggtctggaccacgccggagagcgtcgaagcgggggcggtgttcgccgagatcggcccgcgcatggccgagttgagcggttcccggctggccgcgcagcaacagatggaaggcctcctggcgccgcaccggcccaaggagcccgcgtggttcctggccaccgtcggcgtctcgcccgaccaccagggcaagggtctgggcagcgccgtcgtgctccccggagtggaggcggccgagcgcgccggggtgcccgccttcctggagacctccgcgccccgcaacctccccttctacgagcggctcggcttcaccgtcaccgccgacgtcgaggtgcccgaaggaccgcgcacctggtgcatgacccgcaagcccggtgcctgacaactttattatacatagttgatggccggccgcttcgagcagacatgataagatacattgatgagtttggacaaaccacaactagaatgcagtgaaaaaaatgctttatttgtgaaatttgtgatgctattgctttatttgtaaccattataagctgcaataaacaagttaacaacaacaattgcattcattttatgtttcaggttcagggggaggtgtgggaggttttttaaagcaagtaaaacctctacaaatgtggtagcggccgcggcgctcttccgcttcctcgctcactgactcgctgcgctcggtcgttcggctgcggcgagcggtatcagctcactcaaaggcggtaatacggttatccacagaatcaggggataacgcaggaaagaacatgtgagcaaaaggccagcaaaaggccaggaaccgtaaaaaggccgcgttgctggcgtttttccataggctccgcccccctgacgagcatcacaaaaatcgacgctcaagtcagaggtggcgaaacccgacaggactataaagataccaggcgtttccccctggaagctccctcgtgcgctctcctgttccgaccctgccgcttaccggatacctgtccgcctttctctcttcgggaagcgtggcgctttctcatagctcacgctgtaggtatctcagttcggtgtaggtcgttcgctccaagctgggctgtgtgcacgaaccccccgttcagcccgaccgctgcgccttatccggtaactatcgtcttgagtccaacccggtaagacacgacttatcgccactggcagcagccactggtaacaggattagcagagcgaggtatgtaggcggtgctacagagttcttgaagtggtggcctaactacggctacactagaagaacagtatttggtatctgcgctctgctgaagccagttaccttcggaaaaagagttggtagctcttgatccggcaaacaaaccaccgctggtagcggtggtttttttgtttgcaagcagcagattacgcgcagaaaaaaaggatctcaagaagatcctttgatcttttctacggggtctgacgctcagtggaacgaaaactcacgttaagggattttggtcatgagattatcaaaaaggatcttcacctagatccttttaaattaaaaatgaagttttaaatcaatctaaagtatatatgagtaaacttggtctgacagttaccaatgcttaatcagtgaggcacctatctcagcgatctgtctatttcgttcatccatagttgcctgactccccgtcgtgtagataactacgatacgggagggcttaccatctggccccagtgctgcaatgataccgcgagacccacgctcaccggctccagatttatcagcaataaaccagccagccggaagggccgagcgcagaagtggtcctgcaactttatccgcctccatccagtctattaattgttgccgggaagctagagtaagtagttcgccagttaatagtttgcgcaacgttgttgccattgctacaggcatcgtggtgtcacgctcgtcgtttggtatggcttcattcagctccggttcccaacgatcaaggcgagttacatgatcccccatgttgtgcaaaaaagcggttagctccttcggtcctccgatcgttgtcagaagtaagttggccgcagtgttatcactcatggttatggcagcactgcataattctcttactgtcatgccatccgtaagatgcttttctgtgactggtgagtactcaaccaagtcattctgagaatagtgtatgcggcgaccgagttgctcttgcccggcgtcaatacgggataataccgcgccacatagcagaactttaaaagtgctcatcattggaaaacgttcttcggggcgaaaactctcaaggatcttaccgctgttgagatccagttcgatgtaacccactcgtgcacccaactgatcttcagcatcttttactttcaccagcgtttctgggtgagcaaaaacaggaaggcaaaatgccgcaaaaaagggaataagggcgacacggaaatgttgaatactcatactcttcctttttcaatattattgaagcatttatcagggttattgtctcatgagcggatacatatttgaatgtatttagaaaaataaacaaataggggttccgcgcacatttccccgaaaagtgccacctgacgtctaagaaaccattattatcatgacattaacctataaaaataggcgtatcacgaggccctttcgtcggcgcgccgcggccgc

SEQ ID NO: 717 - DNA, 4624 bp, synthetic construct
  source 1..4624: mol_type = other DNA
caactttgtatagaaaagttggagggcctatttcccatgattccttcatatttgcatatacgatacaaggctgttagagagataattggaattaatttgactgtaaacacaaagatattagtacaaaatacgtgacgtagaaagtaataatttcttgggtagtttgcagttttaaaattatgttttaaaatggactatcatatgcttaccgtaacttgaaagtatttcgatttcttggctttatatatcttgtggaaaggacgaaacaccgtgcacacctcctggcgggcagctctgctgctgctaatgaagctgctgtgttctggcaatacctgcagcagcaacaaaagcagcagcagggaggcctgccctgactgcccactttttgtttttcaagtttgtacaaaaaagcaggctgggttgcgccttttccaaggcagccctgggtttgcgcagggacgcggctgctctgggcgtggttccgggaaacgcagcggcgccgaccctgggtctcgcacattcttcacgtccgttcgcagcgtcacccggatcttcgccgctacccttgtgggccccccggcgacgcttcctgctccgcccctaagtcgggaaggttccttgcggttcgcggcgtgccggacgtgacaaacggaagccgcacgtctcactagtaccctcgcagacggacagcgccagggagcaatggcagcgcgccgaccgcgatgggctgtggccaatagcggctgctcagcagggcgcgccgagagcagcggccgggaaggggcggtgcgggaggcggggtgtggggcggtagtgtgggccctgttcctgcccgcgcggtgttccgcattctgcaagcctccggagcgcacgtcggcagtcggctccctcgttgaccgaatcaccgacctctctccccaggacccagctttcttgtacaaagtgggccaccatggtgagcaagggcgaggagctgttcaccggggtggtgcccatcctggtcgagctggacggcgacgtaaacggccacaagttcagcgtgtccggcgagggcgagggcgatgccacctacggcaagctgaccctgaagttcatctgcaccaccggcaagctgcccgtgccctggcccaccctcgtgaccaccctgacctacggcgtgcagtgcttcagccgctaccccgaccacatgaagcagcacgacttcttcaagtccgccatgcccgaaggctacgtccaggagcgcaccatcttcttcaaggacgacggcaactacaagacccgcgccgaggtgaagttcgagggcgacaccctggtgaaccgcatcgagctgaagggcatcgacttcaaggaggacggcaacatcctggggcacaagctggagtacaactacaacagccacaacgtctatatcatggccgacaagcagaagaacggcatcaaggtgaacttcaagatccgccacaacatcgaggacggcagcgtgcagctcgccgaccactaccagcagaacacccccatcggcgacggccccgtgctgctgcccgacaaccactacctgagcacccagtccgccctgagcaaagaccccaacgagaagcgcgatcacatggtcctgctggagttcgtgaccgccgccgggatcactctcggcatggacgagctgtacaagggaagcggagagggcaggggaagtcttctaacatgcggggacgtggaggaaaatcccggccccatgaccgagtacaagcccacggtgcgcctcgccacccgcgacgacgtccccagggccgtacgcaccctcgccgccgcgttcgccgactaccccgccacgcgccacaccgtcgatccggaccgccacatcgagcgggtcaccgagctgcaagaactcttcctcacgcgcgtcgggctcgacatcggcaaggtgtgggtcgcggacgacggcgccgcggtggcggtctggaccacgccggagagcgtcgaagcgggggcggtgttcgccgagatcggcccgcgcatggccgagttgagcggttcccggctggccgcgcagcaacagatggaaggcctcctggcgccgcaccggcccaaggagcccgcgtggttcctggccaccgtcggcgtctcgcccgaccaccagggcaagggtctgggcagcgccgtcgtgctccccggagtggaggcggccgagcgcgccggggtgcccgccttcctggagacctccgcgccccgcaacctccccttctacgagcggctcggcttcaccgtcaccgccgacgtcgaggtgcccgaaggaccgcgcacctggtgcatgacccgcaagcccggtgcctgacaactttattatacatagttgatggccggccgcttcgagcagacatgataagatacattgatgagtttggacaaaccacaactagaatgcagtgaaaaaaatgctttatttgtgaaatttgtgatgctattgctttatttgtaaccattataagctgcaataaacaagttaacaacaacaattgcattcattttatgtttcaggttcagggggaggtgtgggaggttttttaaagcaagtaaaacctctacaaatgtggtagcggccgcggcgctcttccgcttcctcgctcactgactcgctgcgctcggtcgttcggctgcggcgagcggtatcagctcactcaaaggcggtaatacggttatccacagaatcaggggataacgcaggaaagaacatgtgagcaaaaggccagcaaaaggccaggaaccgtaaaaaggccgcgttgctggcgtttttccataggctccgcccccctgacgagcatcacaaaaatcgacgctcaagtcagaggtggcgaaacccgacaggactataaagataccaggcgtttccccctggaagctccctcgtgcgctctcctgttccgaccctgccgcttaccggatacctgtccgcctttctctcttcgggaagcgtggcgctttctcatagctcacgctgtaggtatctcagttcggtgtaggtcgttcgctccaagctgggctgtgtgcacgaaccccccgttcagcccgaccgctgcgccttatccggtaactatcgtcttgagtccaacccggtaagacacgacttatcgccactggcagcagccactggtaacaggattagcagagcgaggtatgtaggcggtgctacagagttcttgaagtggtggcctaactacggctacactagaagaacagtatttggtatctgcgctctgctgaagccagttaccttcggaaaaagagttggtagctcttgatccggcaaacaaaccaccgctggtagcggtggtttttttgtttgcaagcagcagattacgcgcagaaaaaaaggatctcaagaagatcctttgatcttttctacggggtctgacgctcagtggaacgaaaactcacgttaagggattttggtcatgagattatcaaaaaggatcttcacctagatccttttaaattaaaaatgaagttttaaatcaatctaaagtatatatgagtaaacttggtctgacagttaccaatgcttaatcagtgaggcacctatctcagcgatctgtctatttcgttcatccatagttgcctgactccccgtcgtgtagataactacgatacgggagggcttaccatctggccccagtgctgcaatgataccgcgagacccacgctcaccggctccagatttatcagcaataaaccagccagccggaagggccgagcgcagaagtggtcctgcaactttatccgcctccatccagtctattaattgttgccgggaagctagagtaagtagttcgccagttaatagtttgcgcaacgttgttgccattgctacaggcatcgtggtgtcacgctcgtcgtttggtatggcttcattcagctccggttcccaacgatcaaggcgagttacatgatcccccatgttgtgcaaaaaagcggttagctccttcggtcctccgatcgttgtcagaagtaagttggccgcagtgttatcactcatggttatggcagcactgcataattctcttactgtcatgccatccgtaagatgcttttctgtgactggtgagtactcaaccaagtcattctgagaatagtgtatgcggcgaccgagttgctcttgcccggcgtcaatacgggataataccgcgccacatagcagaactttaaaagtgctcatcattggaaaacgttcttcggggcgaaaactctcaaggatcttaccgctgttgagatccagttcgatgtaacccactcgtgcacccaactgatcttcagcatcttttactttcaccagcgtttctgggtgagcaaaaacaggaaggcaaaatgccgcaaaaaagggaataagggcgacacggaaatgttgaatactcatactcttcctttttcaatattattgaagcatttatcagggttattgtctcatgagcggatacatatttgaatgtatttagaaaaataaacaaataggggttccgcgcacatttccccgaaaagtgccacctgacgtctaagaaaccattattatcatgacattaacctataaaaataggcgtatcacgaggccctttcgtcggcgcgccgcggccgc

SEQ ID NO: 718 - DNA, 4624 bp, synthetic construct
  source 1..4624: mol_type = other DNA
caactttgtatagaaaagttggagggcctatttcccatgattccttcatatttgcatatacgatacaaggctgttagagagataattggaattaatttgactgtaaacacaaagatattagtacaaaatacgtgacgtagaaagtaataatttcttgggtagtttgcagttttaaaattatgttttaaaatggactatcatatgcttaccgtaacttgaaagtatttcgatttcttggctttatatatcttgtggaaaggacgaaacaccgtgcacacctcctggcgggcagctctgctgctgctaatgatactgctgtgttctggcaatacctgcagcagaaacaaaagcagcagcagggaggcctgccctgactgcccactttttgtttttcaagtttgtacaaaaaagcaggctgggttgcgccttttccaaggcagccctgggtttgcgcagggacgcggctgctctgggcgtggttccgggaaacgcagcggcgccgaccctgggtctcgcacattcttcacgtccgttcgcagcgtcacccggatcttcgccgctacccttgtgggccccccggcgacgcttcctgctccgcccctaagtcgggaaggttccttgcggttcgcggcgtgccggacgtgacaaacggaagccgcacgtctcactagtaccctcgcagacggacagcgccagggagcaatggcagcgcgccgaccgcgatgggctgtggccaatagcggctgctcagcagggcgcgccgagagcagcggccgggaaggggcggtgcgggaggcggggtgtggggcggtagtgtgggccctgttcctgcccgcgcggtgttccgcattctgcaagcctccggagcgcacgtcggcagtcggctccctcgttgaccgaatcaccgacctctctccccaggacccagctttcttgtacaaagtgggccaccatggtgagcaagggcgaggagctgttcaccggggtggtgcccatcctggtcgagctggacggcgacgtaaacggccacaagttcagcgtgtccggcgagggcgagggcgatgccacctacggcaagctgaccctgaagttcatctgcaccaccggcaagctgcccgtgccctggcccaccctcgtgaccaccctgacctacggcgtgcagtgcttcagccgctaccccgaccacatgaagcagcacgacttcttcaagtccgccatgcccgaaggctacgtccaggagcgcaccatcttcttcaaggacgacggcaactacaagacccgcgccgaggtgaagttcgagggcgacaccctggtgaaccgcatcgagctgaagggcatcgacttcaaggaggacggcaacatcctggggcacaagctggagtacaactacaacagccacaacgtctatatcatggccgacaagcagaagaacggcatcaaggtgaacttcaagatccgccacaacatcgaggacggcagcgtgcagctcgccgaccactaccagcagaacacccccatcggcgacggccccgtgctgctgcccgacaaccactacctgagcacccagtccgccctgagcaaagaccccaacgagaagcgcgatcacatggtcctgctggagttcgtgaccgccgccgggatcactctcggcatggacgagctgtacaagggaagcggagagggcaggggaagtcttctaacatgcggggacgtggaggaaaatcccggccccatgaccgagtacaagcccacggtgcgcctcgccacccgcgacgacgtccccagggccgtacgcaccctcgccgccgcgttcgccgactaccccgccacgcgccacaccgtcgatccggaccgccacatcgagcgggtcaccgagctgcaagaactcttcctcacgcgcgtcgggctcgacatcggcaaggtgtgggtcgcggacgacggcgccgcggtggcggtctggaccacgccggagagcgtcgaagcgggggcggtgttcgccgagatcggcccgcgcatggccgagttgagcggttcccggctggccgcgcagcaacagatggaaggcctcctggcgccgcaccggcccaaggagcccgcgtggttcctggccaccgtcggcgtctcgcccgaccaccagggcaagggtctgggcagcgccgtcgtgctccccggagtggaggcggccgagcgcgccggggtgcccgccttcctggagacctccgcgccccgcaacctccccttctacgagcggctcggcttcaccgtcaccgccgacgtcgaggtgcccgaaggaccgcgcacctggtgcatgacccgcaagcccggtgcctgacaactttattatacatagttgatggccggccgcttcgagcagacatgataagatacattgatgagtttggacaaaccacaactagaatgcagtgaaaaaaatgctttatttgtgaaatttgtgatgctattgctttatttgtaaccattataagctgcaataaacaagttaacaacaacaattgcattcattttatgtttcaggttcagggggaggtgtgggaggttttttaaagcaagtaaaacctctacaaatgtggtagcggccgcggcgctcttccgcttcctcgctcactgactcgctgcgctcggtcgttcggctgcggcgagcggtatcagctcactcaaaggcggtaatacggttatccacagaatcaggggataacgcaggaaagaacatgtgagcaaaaggccagcaaaaggccaggaaccgtaaaaaggccgcgttgctggcgtttttccataggctccgcccccctgacgagcatcacaaaaatcgacgctcaagtcagaggtggcgaaacccgacaggactataaagataccaggcgtttccccctggaagctccctcgtgcgctctcctgttccgaccctgccgcttaccggatacctgtccgcctttctctcttcgggaagcgtggcgctttctcatagctcacgctgtaggtatctcagttcggtgtaggtcgttcgctccaagctgggctgtgtgcacgaaccccccgttcagcccgaccgctgcgccttatccggtaactatcgtcttgagtccaacccggtaagacacgacttatcgccactggcagcagccactggtaacaggattagcagagcgaggtatgtaggcggtgctacagagttcttgaagtggtggcctaactacggctacactagaagaacagtatttggtatctgcgctctgctgaagccagttaccttcggaaaaagagttggtagctcttgatccggcaaacaaaccaccgctggtagcggtggtttttttgtttgcaagcagcagattacgcgcagaaaaaaaggatctcaagaagatcctttgatcttttctacggggtctgacgctcagtggaacgaaaactcacgttaagggattttggtcatgagattatcaaaaaggatcttcacctagatccttttaaattaaaaatgaagttttaaatcaatctaaagtatatatgagtaaacttggtctgacagttaccaatgcttaatcagtgaggcacctatctcagcgatctgtctatttcgttcatccatagttgcctgactccccgtcgtgtagataactacgatacgggagggcttaccatctggccccagtgctgcaatgataccgcgagacccacgctcaccggctccagatttatcagcaataaaccagccagccggaagggccgagcgcagaagtggtcctgcaactttatccgcctccatccagtctattaattgttgccgggaagctagagtaagtagttcgccagttaatagtttgcgcaacgttgttgccattgctacaggcatcgtggtgtcacgctcgtcgtttggtatggcttcattcagctccggttcccaacgatcaaggcgagttacatgatcccccatgttgtgcaaaaaagcggttagctccttcggtcctccgatcgttgtcagaagtaagttggccgcagtgttatcactcatggttatggcagcactgcataattctcttactgtcatgccatccgtaagatgcttttctgtgactggtgagtactcaaccaagtcattctgagaatagtgtatgcggcgaccgagttgctcttgcccggcgtcaatacgggataataccgcgccacatagcagaactttaaaagtgctcatcattggaaaacgttcttcggggcgaaaactctcaaggatcttaccgctgttgagatccagttcgatgtaacccactcgtgcacccaactgatcttcagcatcttttactttcaccagcgtttctgggtgagcaaaaacaggaaggcaaaatgccgcaaaaaagggaataagggcgacacggaaatgttgaatactcatactcttcctttttcaatattattgaagcatttatcagggttattgtctcatgagcggatacatatttgaatgtatttagaaaaataaacaaataggggttccgcgcacatttccccgaaaagtgccacctgacgtctaagaaaccattattatcatgacattaacctataaaaataggcgtatcacgaggccctttcgtcggcgcgccgcggccgc

SEQ ID NO: 719 - DNA, 4624 bp, synthetic construct
  source 1..4624: mol_type = other DNA
caactttgtatagaaaagttggagggcctatttcccatgattccttcatatttgcatatacgatacaaggctgttagagagataattggaattaatttgactgtaaacacaaagatattagtacaaaatacgtgacgtagaaagtaataatttcttgggtagtttgcagttttaaaattatgttttaaaatggactatcatatgcttaccgtaacttgaaagtatttcgatttcttggctttatatatcttgtggaaaggacgaaacaccgtgcacacctcctggcgggcagctctgctgctgctaatgatgatgctgtgttctggcaatacctgcagcaacaacaaaagcagcagcagggaggcctgccctgactgcccactttttgtttttcaagtttgtacaaaaaagcaggctgggttgcgccttttccaaggcagccctgggtttgcgcagggacgcggctgctctgggcgtggttccgggaaacgcagcggcgccgaccctgggtctcgcacattcttcacgtccgttcgcagcgtcacccggatcttcgccgctacccttgtgggccccccggcgacgcttcctgctccgcccctaagtcgggaaggttccttgcggttcgcggcgtgccggacgtgacaaacggaagccgcacgtctcactagtaccctcgcagacggacagcgccagggagcaatggcagcgcgccgaccgcgatgggctgtggccaatagcggctgctcagcagggcgcgccgagagcagcggccgggaaggggcggtgcgggaggcggggtgtggggcggtagtgtgggccctgttcctgcccgcgcggtgttccgcattctgcaagcctccggagcgcacgtcggcagtcggctccctcgttgaccgaatcaccgacctctctccccaggacccagctttcttgtacaaagtgggccaccatggtgagcaagggcgaggagctgttcaccggggtggtgcccatcctggtcgagctggacggcgacgtaaacggccacaagttcagcgtgtccggcgagggcgagggcgatgccacctacggcaagctgaccctgaagttcatctgcaccaccggcaagctgcccgtgccctggcccaccctcgtgaccaccctgacctacggcgtgcagtgcttcagccgctaccccgaccacatgaagcagcacgacttcttcaagtccgccatgcccgaaggctacgtccaggagcgcaccatcttcttcaaggacgacggcaactacaagacccgcgccgaggtgaagttcgagggcgacaccctggtgaaccgcatcgagctgaagggcatcgacttcaaggaggacggcaacatcctggggcacaagctggagtacaactacaacagccacaacgtctatatcatggccgacaagcagaagaacggcatcaaggtgaacttcaagatccgccacaacatcgaggacggcagcgtgcagctcgccgaccactaccagcagaacacccccatcggcgacggccccgtgctgctgcccgacaaccactacctgagcacccagtccgccctgagcaaagaccccaacgagaagcgcgatcacatggtcctgctggagttcgtgaccgccgccgggatcactctcggcatggacgagctgtacaagggaagcggagagggcaggggaagtcttctaacatgcggggacgtggaggaaaatcccggccccatgaccgagtacaagcccacggtgcgcctcgccacccgcgacgacgtccccagggccgtacgcaccctcgccgccgcgttcgccgactaccccgccacgcgccacaccgtcgatccggaccgccacatcgagcgggtcaccgagctgcaagaactcttcctcacgcgcgtcgggctcgacatcggcaaggtgtgggtcgcggacgacggcgccgcggtggcggtctggaccacgccggagagcgtcgaagcgggggcggtgttcgccgagatcggcccgcgcatggccgagttgagcggttcccggctggccgcgcagcaacagatggaaggcctcctggcgccgcaccggcccaaggagcccgcgtggttcctggccaccgtcggcgtctcgcccgaccaccagggcaagggtctgggcagcgccgtcgtgctccccggagtggaggcggccgagcgcgccggggtgcccgccttcctggagacctccgcgccccgcaacctccccttctacgagcggctcggcttcaccgtcaccgccgacgtcgaggtgcccgaaggaccgcgcacctggtgcatgacccgcaagcccggtgcctgacaactttattatacatagttgatggccggccgcttcgagcagacatgataagatacattgatgagtttggacaaaccacaactagaatgcagtgaaaaaaatgctttatttgtgaaatttgtgatgctattgctttatttgtaaccattataagctgcaataaacaagttaacaacaacaattgcattcattttatgtttcaggttcagggggaggtgtgggaggttttttaaagcaagtaaaacctctacaaatgtggtagcggccgcggcgctcttccgcttcctcgctcactgactcgctgcgctcggtcgttcggctgcggcgagcggtatcagctcactcaaaggcggtaatacggttatccacagaatcaggggataacgcaggaaagaacatgtgagcaaaaggccagcaaaaggccaggaaccgtaaaaaggccgcgttgctggcgtttttccataggctccgcccccctgacgagcatcacaaaaatcgacgctcaagtcagaggtggcgaaacccgacaggactataaagataccaggcgtttccccctggaagctccctcgtgcgctctcctgttccgaccctgccgcttaccggatacctgtccgcctttctctcttcgggaagcgtggcgctttctcatagctcacgctgtaggtatctcagttcggtgtaggtcgttcgctccaagctgggctgtgtgcacgaaccccccgttcagcccgaccgctgcgccttatccggtaactatcgtcttgagtccaacccggtaagacacgacttatcgccactggcagcagccactggtaacaggattagcagagcgaggtatgtaggcggtgctacagagttcttgaagtggtggcctaactacggctacactagaagaacagtatttggtatctgcgctctgctgaagccagttaccttcggaaaaagagttggtagctcttgatccggcaaacaaaccaccgctggtagcggtggtttttttgtttgcaagcagcagattacgcgcagaaaaaaaggatctcaagaagatcctttgatcttttctacggggtctgacgctcagtggaacgaaaactcacgttaagggattttggtcatgagattatcaaaaaggatcttcacctagatccttttaaattaaaaatgaagttttaaatcaatctaaagtatatatgagtaaacttggtctgacagttaccaatgcttaatcagtgaggcacctatctcagcgatctgtctatttcgttcatccatagttgcctgactccccgtcgtgtagataactacgatacgggagggcttaccatctggccccagtgctgcaatgataccgcgagacccacgctcaccggctccagatttatcagcaataaaccagccagccggaagggccgagcgcagaagtggtcctgcaactttatccgcctccatccagtctattaattgttgccgggaagctagagtaagtagttcgccagttaatagtttgcgcaacgttgttgccattgctacaggcatcgtggtgtcacgctcgtcgtttggtatggcttcattcagctccggttcccaacgatcaaggcgagttacatgatcccccatgttgtgcaaaaaagcggttagctccttcggtcctccgatcgttgtcagaagtaagttggccgcagtgttatcactcatggttatggcagcactgcataattctcttactgtcatgccatccgtaagatgcttttctgtgactggtgagtactcaaccaagtcattctgagaatagtgtatgcggcgaccgagttgctcttgcccggcgtcaatacgggataataccgcgccacatagcagaactttaaaagtgctcatcattggaaaacgttcttcggggcgaaaactctcaaggatcttaccgctgttgagatccagttcgatgtaacccactcgtgcacccaactgatcttcagcatcttttactttcaccagcgtttctgggtgagcaaaaacaggaaggcaaaatgccgcaaaaaagggaataagggcgacacggaaatgttgaatactcatactcttcctttttcaatattattgaagcatttatcagggttattgtctcatgagcggatacatatttgaatgtatttagaaaaataaacaaataggggttccgcgcacatttccccgaaaagtgccacctgacgtctaagaaaccattattatcatgacattaacctataaaaataggcgtatcacgaggccctttcgtcggcgcgccgcggccgc

SEQ ID NO: 720 - DNA, 4624 bp, synthetic construct
  source 1..4624: mol_type = other DNA
caactttgtatagaaaagttggagggcctatttcccatgattccttcatatttgcatatacgatacaaggctgttagagagataattggaattaatttgactgtaaacacaaagatattagtacaaaatacgtgacgtagaaagtaataatttcttgggtagtttgcagttttaaaattatgttttaaaatggactatcatatgcttaccgtaacttgaaagtatttcgatttcttggctttatatatcttgtggaaaggacgaaacaccgtgcacacctcctggcgggcagctctgctgctgctaatgcaactgctgtgttctggcaatacctgcagcagaagcaaaagcagcagcagggaggcctgccctgactgcccactttttgtttttcaagtttgtacaaaaaagcaggctgggttgcgccttttccaaggcagccctgggtttgcgcagggacgcggctgctctgggcgtggttccgggaaacgcagcggcgccgaccctgggtctcgcacattcttcacgtccgttcgcagcgtcacccggatcttcgccgctacccttgtgggccccccggcgacgcttcctgctccgcccctaagtcgggaaggttccttgcggttcgcggcgtgccggacgtgacaaacggaagccgcacgtctcactagtaccctcgcagacggacagcgccagggagcaatggcagcgcgccgaccgcgatgggctgtggccaatagcggctgctcagcagggcgcgccgagagcagcggccgggaaggggcggtgcgggaggcggggtgtggggcggtagtgtgggccctgttcctgcccgcgcggtgttccgcattctgcaagcctccggagcgcacgtcggcagtcggctccctcgttgaccgaatcaccgacctctctccccaggacccagctttcttgtacaaagtgggccaccatggtgagcaagggcgaggagctgttcaccggggtggtgcccatcctggtcgagctggacggcgacgtaaacggccacaagttcagcgtgtccggcgagggcgagggcgatgccacctacggcaagctgaccctgaagttcatctgcaccaccggcaagctgcccgtgccctggcccaccctcgtgaccaccctgacctacggcgtgcagtgcttcagccgctaccccgaccacatgaagcagcacgacttcttcaagtccgccatgcccgaaggctacgtccaggagcgcaccatcttcttcaaggacgacggcaactacaagacccgcgccgaggtgaagttcgagggcgacaccctggtgaaccgcatcgagctgaagggcatcgacttcaaggaggacggcaacatcctggggcacaagctggagtacaactacaacagccacaacgtctatatcatggccgacaagcagaagaacggcatcaaggtgaacttcaagatccgccacaacatcgaggacggcagcgtgcagctcgccgaccactaccagcagaacacccccatcggcgacggccccgtgctgctgcccgacaaccactacctgagcacccagtccgccctgagcaaagaccccaacgagaagcgcgatcacatggtcctgctggagttcgtgaccgccgccgggatcactctcggcatggacgagctgtacaagggaagcggagagggcaggggaagtcttctaacatgcggggacgtggaggaaaatcccggccccatgaccgagtacaagcccacggtgcgcctcgccacccgcgacgacgtccccagggccgtacgcaccctcgccgccgcgttcgccgactaccccgccacgcgccacaccgtcgatccggaccgccacatcgagcgggtcaccgagctgcaagaactcttcctcacgcgcgtcgggctcgacatcggcaaggtgtgggtcgcggacgacggcgccgcggtggcggtctggaccacgccggagagcgtcgaagcgggggcggtgttcgccgagatcggcccgcgcatggccgagttgagcggttcccggctggccgcgcagcaacagatggaaggcctcctggcgccgcaccggcccaaggagcccgcgtggttcctggccaccgtcggcgtctcgcccgaccaccagggcaagggtctgggcagcgccgtcgtgctccccggagtggaggcggccgagcgcgccggggtgcccgccttcctggagacctccgcgccccgcaacctccccttctacgagcggctcggcttcaccgtcaccgccgacgtcgaggtgcccgaaggaccgcgcacctggtgcatgacccgcaagcccggtgcctgacaactttattatacatagttgatggccggccgcttcgagcagacatgataagatacattgatgagtttggacaaaccacaactagaatgcagtgaaaaaaatgctttatttgtgaaatttgtgatgctattgctttatttgtaaccattataagctgcaataaacaagttaacaacaacaattgcattcattttatgtttcaggttcagggggaggtgtgggaggttttttaaagcaagtaaaacctctacaaatgtggtagcggccgcggcgctcttccgcttcctcgctcactgactcgctgcgctcggtcgttcggctgcggcgagcggtatcagctcactcaaaggcggtaatacggttatccacagaatcaggggataacgcaggaaagaacatgtgagcaaaaggccagcaaaaggccaggaaccgtaaaaaggccgcgttgctggcgtttttccataggctccgcccccctgacgagcatcacaaaaatcgacgctcaagtcagaggtggcgaaacccgacaggactataaagataccaggcgtttccccctggaagctccctcgtgcgctctcctgttccgaccctgccgcttaccggatacctgtccgcctttctctcttcgggaagcgtggcgctttctcatagctcacgctgtaggtatctcagttcggtgtaggtcgttcgctccaagctgggctgtgtgcacgaaccccccgttcagcccgaccgctgcgccttatccggtaactatcgtcttgagtccaacccggtaagacacgacttatcgccactggcagcagccactggtaacaggattagcagagcgaggtatgtaggcggtgctacagagttcttgaagtggtggcctaactacggctacactagaagaacagtatttggtatctgcgctctgctgaagccagttaccttcggaaaaagagttggtagctcttgatccggcaaacaaaccaccgctggtagcggtggtttttttgtttgcaagcagcagattacgcgcagaaaaaaaggatctcaagaagatcctttgatcttttctacggggtctgacgctcagtggaacgaaaactcacgttaagggattttggtcatgagattatcaaaaaggatcttcacctagatccttttaaattaaaaatgaagttttaaatcaatctaaagtatatatgagtaaacttggtctgacagttaccaatgcttaatcagtgaggcacctatctcagcgatctgtctatttcgttcatccatagttgcctgactccccgtcgtgtagataactacgatacgggagggcttaccatctggccccagtgctgcaatgataccgcgagacccacgctcaccggctccagatttatcagcaataaaccagccagccggaagggccgagcgcagaagtggtcctgcaactttatccgcctccatccagtctattaattgttgccgggaagctagagtaagtagttcgccagttaatagtttgcgcaacgttgttgccattgctacaggcatcgtggtgtcacgctcgtcgtttggtatggcttcattcagctccggttcccaacgatcaaggcgagttacatgatcccccatgttgtgcaaaaaagcggttagctccttcggtcctccgatcgttgtcagaagtaagttggccgcagtgttatcactcatggttatggcagcactgcataattctcttactgtcatgccatccgtaagatgcttttctgtgactggtgagtactcaaccaagtcattctgagaatagtgtatgcggcgaccgagttgctcttgcccggcgtcaatacgggataataccgcgccacatagcagaactttaaaagtgctcatcattggaaaacgttcttcggggcgaaaactctcaaggatcttaccgctgttgagatccagttcgatgtaacccactcgtgcacccaactgatcttcagcatcttttactttcaccagcgtttctgggtgagcaaaaacaggaaggcaaaatgccgcaaaaaagggaataagggcgacacggaaatgttgaatactcatactcttcctttttcaatattattgaagcatttatcagggttattgtctcatgagcggatacatatttgaatgtatttagaaaaataaacaaataggggttccgcgcacatttccccgaaaagtgccacctgacgtctaagaaaccattattatcatgacattaacctataaaaataggcgtatcacgaggccctttcgtcggcgcgccgcggccgc

SEQ ID NO: 721 - DNA, 4624 bp, synthetic construct
  source 1..4624: mol_type = other DNA
caactttgtatagaaaagttggagggcctatttcccatgattccttcatatttgcatatacgatacaaggctgttagagagataattggaattaatttgactgtaaacacaaagatattagtacaaaatacgtgacgtagaaagtaataatttcttgggtagtttgcagttttaaaattatgttttaaaatggactatcatatgcttaccgtaacttgaaagtatttcgatttcttggctttatatatcttgtggaaaggacgaaacaccgtgcacacctcctggcgggcagctctgctgctgctaatgcagatgctgtgttctggcaatacctgcagcaacagcaaaagcagcagcagggaggcctgccctgactgcccactttttgtttttcaagtttgtacaaaaaagcaggctgggttgcgccttttccaaggcagccctgggtttgcgcagggacgcggctgctctgggcgtggttccgggaaacgcagcggcgccgaccctgggtctcgcacattcttcacgtccgttcgcagcgtcacccggatcttcgccgctacccttgtgggccccccggcgacgcttcctgctccgcccctaagtcgggaaggttccttgcggttcgcggcgtgccggacgtgacaaacggaagccgcacgtctcactagtaccctcgcagacggacagcgccagggagcaatggcagcgcgccgaccgcgatgggctgtggccaatagcggctgctcagcagggcgcgccgagagcagcggccgggaaggggcggtgcgggaggcggggtgtggggcggtagtgtgggccctgttcctgcccgcgcggtgttccgcattctgcaagcctccggagcgcacgtcggcagtcggctccctcgttgaccgaatcaccgacctctctccccaggacccagctttcttgtacaaagtgggccaccatggtgagcaagggcgaggagctgttcaccggggtggtgcccatcctggtcgagctggacggcgacgtaaacggccacaagttcagcgtgtccggcgagggcgagggcgatgccacctacggcaagctgaccctgaagttcatctgcaccaccggcaagctgcccgtgccctggcccaccctcgtgaccaccctgacctacggcgtgcagtgcttcagccgctaccccgaccacatgaagcagcacgacttcttcaagtccgccatgcccgaaggctacgtccaggagcgcaccatcttcttcaaggacgacggcaactacaagacccgcgccgaggtgaagttcgagggcgacaccctggtgaaccgcatcgagctgaagggcatcgacttcaaggaggacggcaacatcctggggcacaagctggagtacaactacaacagccacaacgtctatatcatggccgacaagcagaagaacggcatcaaggtgaacttcaagatccgccacaacatcgaggacggcagcgtgcagctcgccgaccactaccagcagaacacccccatcggcgacggccccgtgctgctgcccgacaaccactacctgagcacccagtccgccctgagcaaagaccccaacgagaagcgcgatcacatggtcctgctggagttcgtgaccgccgccgggatcactctcggcatggacgagctgtacaagggaagcggagagggcaggggaagtcttctaacatgcggggacgtggaggaaaatcccggccccatgaccgagtacaagcccacggtgcgcctcgccacccgcgacgacgtccccagggccgtacgcaccctcgccgccgcgttcgccgactaccccgccacgcgccacaccgtcgatccggaccgccacatcgagcgggtcaccgagctgcaagaactcttcctcacgcgcgtcgggctcgacatcggcaaggtgtgggtcgcggacgacggcgccgcggtggcggtctggaccacgccggagagcgtcgaagcgggggcggtgttcgccgagatcggcccgcgcatggccgagttgagcggttcccggctggccgcgcagcaacagatggaaggcctcctggcgccgcaccggcccaaggagcccgcgtggttcctggccaccgtcggcgtctcgcccgaccaccagggcaagggtctgggcagcgccgtcgtgctccccggagtggaggcggccgagcgcgccggggtgcccgccttcctggagacctccgcgccccgcaacctccccttctacgagcggctcggcttcaccgtcaccgccgacgtcgaggtgcccgaaggaccgcgcacctggtgcatgacccgcaagcccggtgcctgacaactttattatacatagttgatggccggccgcttcgagcagacatgataagatacattgatgagtttggacaaaccacaactagaatgcagtgaaaaaaatgctttatttgtgaaatttgtgatgctattgctttatttgtaaccattataagctgcaataaacaagttaacaacaacaattgcattcattttatgtttcaggttcagggggaggtgtgggaggttttttaaagcaagtaaaacctctacaaatgtggtagcggccgcggcgctcttccgcttcctcgctcactgactcgctgcgctcggtcgttcggctgcggcgagcggtatcagctcactcaaaggcggtaatacggttatccacagaatcaggggataacgcaggaaagaacatgtgagcaaaaggccagcaaaaggccaggaaccgtaaaaaggccgcgttgctggcgtttttccataggctccgcccccctgacgagcatcacaaaaatcgacgctcaagtcagaggtggcgaaacccgacaggactataaagataccaggcgtttccccctggaagctccctcgtgcgctctcctgttccgaccctgccgcttaccggatacctgtccgcctttctctcttcgggaagcgtggcgctttctcatagctcacgctgtaggtatctcagttcggtgtaggtcgttcgctccaagctgggctgtgtgcacgaaccccccgttcagcccgaccgctgcgccttatccggtaactatcgtcttgagtccaacccggtaagacacgacttatcgccactggcagcagccactggtaacaggattagcagagcgaggtatgtaggcggtgctacagagttcttgaagtggtggcctaactacggctacactagaagaacagtatttggtatctgcgctctgctgaagccagttaccttcggaaaaagagttggtagctcttgatccggcaaacaaaccaccgctggtagcggtggtttttttgtttgcaagcagcagattacgcgcagaaaaaaaggatctcaagaagatcctttgatcttttctacggggtctgacgctcagtggaacgaaaactcacgttaagggattttggtcatgagattatcaaaaaggatcttcacctagatccttttaaattaaaaatgaagttttaaatcaatctaaagtatatatgagtaaacttggtctgacagttaccaatgcttaatcagtgaggcacctatctcagcgatctgtctatttcgttcatccatagttgcctgactccccgtcgtgtagataactacgatacgggagggcttaccatctggccccagtgctgcaatgataccgcgagacccacgctcaccggctccagatttatcagcaataaaccagccagccggaagggccgagcgcagaagtggtcctgcaactttatccgcctccatccagtctattaattgttgccgggaagctagagtaagtagttcgccagttaatagtttgcgcaacgttgttgccattgctacaggcatcgtggtgtcacgctcgtcgtttggtatggcttcattcagctccggttcccaacgatcaaggcgagttacatgatcccccatgttgtgcaaaaaagcggttagctccttcggtcctccgatcgttgtcagaagtaagttggccgcagtgttatcactcatggttatggcagcactgcataattctcttactgtcatgccatccgtaagatgcttttctgtgactggtgagtactcaaccaagtcattctgagaatagtgtatgcggcgaccgagttgctcttgcccggcgtcaatacgggataataccgcgccacatagcagaactttaaaagtgctcatcattggaaaacgttcttcggggcgaaaactctcaaggatcttaccgctgttgagatccagttcgatgtaacccactcgtgcacccaactgatcttcagcatcttttactttcaccagcgtttctgggtgagcaaaaacaggaaggcaaaatgccgcaaaaaagggaataagggcgacacggaaatgttgaatactcatactcttcctttttcaatattattgaagcatttatcagggttattgtctcatgagcggatacatatttgaatgtatttagaaaaataaacaaataggggttccgcgcacatttccccgaaaagtgccacctgacgtctaagaaaccattattatcatgacattaacctataaaaataggcgtatcacgaggccctttcgtcggcgcgccgcggccgc

SEQ ID NO: 722 - DNA, 4624 bp, synthetic construct
  source 1..4624: mol_type = other DNA
caactttgtatagaaaagttggagggcctatttcccatgattccttcatatttgcatatacgatacaaggctgttagagagataattggaattaatttgactgtaaacacaaagatattagtacaaaatacgtgacgtagaaagtaataatttcttgggtagtttgcagttttaaaattatgttttaaaatggactatcatatgcttaccgtaacttgaaagtatttcgatttcttggctttatatatcttgtggaaaggacgaaacaccgtgcacacctcctggcgggcagctctgctgctgctaatgctaatgctgtgttctggcaatacctgcagcaaaagcaaaagcagcagcagggaggcctgccctgactgcccactttttgtttttcaagtttgtacaaaaaagcaggctgggttgcgccttttccaaggcagccctgggtttgcgcagggacgcggctgctctgggcgtggttccgggaaacgcagcggcgccgaccctgggtctcgcacattcttcacgtccgttcgcagcgtcacccggatcttcgccgctacccttgtgggccccccggcgacgcttcctgctccgcccctaagtcgggaaggttccttgcggttcgcggcgtgccggacgtgacaaacggaagccgcacgtctcactagtaccctcgcagacggacagcgccagggagcaatggcagcgcgccgaccgcgatgggctgtggccaatagcggctgctcagcagggcgcgccgagagcagcggccgggaaggggcggtgcgggaggcggggtgtggggcggtagtgtgggccctgttcctgcccgcgcggtgttccgcattctgcaagcctccggagcgcacgtcggcagtcggctccctcgttgaccgaatcaccgacctctctccccaggacccagctttcttgtacaaagtgggccaccatggtgagcaagggcgaggagctgttcaccggggtggtgcccatcctggtcgagctggacggcgacgtaaacggccacaagttcagcgtgtccggcgagggcgagggcgatgccacctacggcaagctgaccctgaagttcatctgcaccaccggcaagctgcccgtgccctggcccaccctcgtgaccaccctgacctacggcgtgcagtgcttcagccgctaccccgaccacatgaagcagcacgacttcttcaagtccgccatgcccgaaggctacgtccaggagcgcaccatcttcttcaaggacgacggcaactacaagacccgcgccgaggtgaagttcgagggcgacaccctggtgaaccgcatcgagctgaagggcatcgacttcaaggaggacggcaacatcctggggcacaagctggagtacaactacaacagccacaacgtctatatcatggccgacaagcagaagaacggcatcaaggtgaacttcaagatccgccacaacatcgaggacggcagcgtgcagctcgccgaccactaccagcagaacacccccatcggcgacggccccgtgctgctgcccgacaaccactacctgagcacccagtccgccctgagcaaagaccccaacgagaagcgcgatcacatggtcctgctggagttcgtgaccgccgccgggatcactctcggcatggacgagctgtacaagggaagcggagagggcaggggaagtcttctaacatgcggggacgtggaggaaaatcccggccccatgaccgagtacaagcccacggtgcgcctcgccacccgcgacgacgtccccagggccgtacgcaccctcgccgccgcgttcgccgactaccccgccacgcgccacaccgtcgatccggaccgccacatcgagcgggtcaccgagctgcaagaactcttcctcacgcgcgtcgggctcgacatcggcaaggtgtgggtcgcggacgacggcgccgcggtggcggtctggaccacgccggagagcgtcgaagcgggggcggtgttcgccgagatcggcccgcgcatggccgagttgagcggttcccggctggccgcgcagcaacagatggaaggcctcctggcgccgcaccggcccaaggagcccgcgtggttcctggccaccgtcggcgtctcgcccgaccaccagggcaagggtctgggcagcgccgtcgtgctccccggagtggaggcggccgagcgcgccggggtgcccgccttcctggagacctccgcgccccgcaacctccccttctacgagcggctcggcttcaccgtcaccgccgacgtcgaggtgcccgaaggaccgcgcacctggtgcatgacccgcaagcccggtgcctgacaactttattatacatagttgatggccggccgcttcgagcagacatgataagatacattgatgagtttggacaaaccacaactagaatgcagtgaaaaaaatgctttatttgtgaaatttgtgatgctattgctttatttgtaaccattataagctgcaataaacaagttaacaacaacaattgcattcattttatgtttcaggttcagggggaggtgtgggaggttttttaaagcaagtaaaacctctacaaatgtggtagcggccgcggcgctcttccgcttcctcgctcactgactcgctgcgctcggtcgttcggctgcggcgagcggtatcagctcactcaaaggcggtaatacggttatccacagaatcaggggataacgcaggaaagaacatgtgagcaaaaggccagcaaaaggccaggaaccgtaaaaaggccgcgttgctggcgtttttccataggctccgcccccctgacgagcatcacaaaaatcgacgctcaagtcagaggtggcgaaacccgacaggactataaagataccaggcgtttccccctggaagctccctcgtgcgctctcctgttccgaccctgccgcttaccggatacctgtccgcctttctctcttcgggaagcgtggcgctttctcatagctcacgctgtaggtatctcagttcggtgtaggtcgttcgctccaagctgggctgtgtgcacgaaccccccgttcagcccgaccgctgcgccttatccggtaactatcgtcttgagtccaacccggtaagacacgacttatcgccactggcagcagccactggtaacaggattagcagagcgaggtatgtaggcggtgctacagagttcttgaagtggtggcctaactacggctacactagaagaacagtatttggtatctgcgctctgctgaagccagttaccttcggaaaaagagttggtagctcttgatccggcaaacaaaccaccgctggtagcggtggtttttttgtttgcaagcagcagattacgcgcagaaaaaaaggatctcaagaagatcctttgatcttttctacggggtctgacgctcagtggaacgaaaactcacgttaagggattttggtcatgagattatcaaaaaggatcttcacctagatccttttaaattaaaaatgaagttttaaatcaatctaaagtatatatgagtaaacttggtctgacagttaccaatgcttaatcagtgaggcacctatctcagcgatctgtctatttcgttcatccatagttgcctgactccccgtcgtgtagataactacgatacgggagggcttaccatctggccccagtgctgcaatgataccgcgagacccacgctcaccggctccagatttatcagcaataaaccagccagccggaagggccgagcgcagaagtggtcctgcaactttatccgcctccatccagtctattaattgttgccgggaagctagagtaagtagttcgccagttaatagtttgcgcaacgttgttgccattgctacaggcatcgtggtgtcacgctcgtcgtttggtatggcttcattcagctccggttcccaacgatcaaggcgagttacatgatcccccatgttgtgcaaaaaagcggttagctccttcggtcctccgatcgttgtcagaagtaagttggccgcagtgttatcactcatggttatggcagcactgcataattctcttactgtcatgccatccgtaagatgcttttctgtgactggtgagtactcaaccaagtcattctgagaatagtgtatgcggcgaccgagttgctcttgcccggcgtcaatacgggataataccgcgccacatagcagaactttaaaagtgctcatcattggaaaacgttcttcggggcgaaaactctcaaggatcttaccgctgttgagatccagttcgatgtaacccactcgtgcacccaactgatcttcagcatcttttactttcaccagcgtttctgggtgagcaaaaacaggaaggcaaaatgccgcaaaaaagggaataagggcgacacggaaatgttgaatactcatactcttcctttttcaatattattgaagcatttatcagggttattgtctcatgagcggatacatatttgaatgtatttagaaaaataaacaaataggggttccgcgcacatttccccgaaaagtgccacctgacgtctaagaaaccattattatcatgacattaacctataaaaataggcgtatcacgaggccctttcgtcggcgcgccgcggccgc

SEQ ID NO: 723 - DNA, 4624 bp, synthetic construct
  source 1..4624: mol_type = other DNA
caactttgtatagaaaagttggagggcctatttcccatgattccttcatatttgcatatacgatacaaggctgttagagagataattggaattaatttgactgtaaacacaaagatattagtacaaaatacgtgacgtagaaagtaataatttcttgggtagtttgcagttttaaaattatgttttaaaatggactatcatatgcttaccgtaacttgaaagtatttcgatttcttggctttatatatcttgtggaaaggacgaaacaccgtgcacacctcctggcgggcagctctgctgctgctacaaatgctgctgtgttctggcaatacctgcagcagcaaaagaagcagcagcagggaggcctgccctgactgcccactttttgtttttcaagtttgtacaaaaaagcaggctgggttgcgccttttccaaggcagccctgggtttgcgcagggacgcggctgctctgggcgtggttccgggaaacgcagcggcgccgaccctgggtctcgcacattcttcacgtccgttcgcagcgtcacccggatcttcgccgctacccttgtgggccccccggcgacgcttcctgctccgcccctaagtcgggaaggttccttgcggttcgcggcgtgccggacgtgacaaacggaagccgcacgtctcactagtaccctcgcagacggacagcgccagggagcaatggcagcgcgccgaccgcgatgggctgtggccaatagcggctgctcagcagggcgcgccgagagcagcggccgggaaggggcggtgcgggaggcggggtgtggggcggtagtgtgggccctgttcctgcccgcgcggtgttccgcattctgcaagcctccggagcgcacgtcggcagtcggctccctcgttgaccgaatcaccgacctctctccccaggacccagctttcttgtacaaagtgggccaccatggtgagcaagggcgaggagctgttcaccggggtggtgcccatcctggtcgagctggacggcgacgtaaacggccacaagttcagcgtgtccggcgagggcgagggcgatgccacctacggcaagctgaccctgaagttcatctgcaccaccggcaagctgcccgtgccctggcccaccctcgtgaccaccctgacctacggcgtgcagtgcttcagccgctaccccgaccacatgaagcagcacgacttcttcaagtccgccatgcccgaaggctacgtccaggagcgcaccatcttcttcaaggacgacggcaactacaagacccgcgccgaggtgaagttcgagggcgacaccctggtgaaccgcatcgagctgaagggcatcgacttcaaggaggacggcaacatcctggggcacaagctggagtacaactacaacagccacaacgtctatatcatggccgacaagcagaagaacggcatcaaggtgaacttcaagatccgccacaacatcgaggacggcagcgtgcagctcgccgaccactaccagcagaacacccccatcggcgacggccccgtgctgctgcccgacaaccactacctgagcacccagtccgccctgagcaaagaccccaacgagaagcgcgatcacatggtcctgctggagttcgtgaccgccgccgggatcactctcggcatggacgagctgtacaagggaagcggagagggcaggggaagtcttctaacatgcggggacgtggaggaaaatcccggccccatgaccgagtacaagcccacggtgcgcctcgccacccgcgacgacgtccccagggccgtacgcaccctcgccgccgcgttcgccgactaccccgccacgcgccacaccgtcgatccggaccgccacatcgagcgggtcaccgagctgcaagaactcttcctcacgcgcgtcgggctcgacatcggcaaggtgtgggtcgcggacgacggcgccgcggtggcggtctggaccacgccggagagcgtcgaagcgggggcggtgttcgccgagatcggcccgcgcatggccgagttgagcggttcccggctggccgcgcagcaacagatggaaggcctcctggcgccgcaccggcccaaggagcccgcgtggttcctggccaccgtcggcgtctcgcccgaccaccagggcaagggtctgggcagcgccgtcgtgctccccggagtggaggcggccgagcgcgccggggtgcccgccttcctggagacctccgcgccccgcaacctccccttctacgagcggctcggcttcaccgtcaccgccgacgtcgaggtgcccgaaggaccgcgcacctggtgcatgacccgcaagcccggtgcctgacaactttattatacatagttgatggccggccgcttcgagcagacatgataagatacattgatgagtttggacaaaccacaactagaatgcagtgaaaaaaatgctttatttgtgaaatttgtgatgctattgctttatttgtaaccattataagctgcaataaacaagttaacaacaacaattgcattcattttatgtttcaggttcagggggaggtgtgggaggttttttaaagcaagtaaaacctctacaaatgtggtagcggccgcggcgctcttccgcttcctcgctcactgactcgctgcgctcggtcgttcggctgcggcgagcggtatcagctcactcaaaggcggtaatacggttatccacagaatcaggggataacgcaggaaagaacatgtgagcaaaaggccagcaaaaggccaggaaccgtaaaaaggccgcgttgctggcgtttttccataggctccgcccccctgacgagcatcacaaaaatcgacgctcaagtcagaggtggcgaaacccgacaggactataaagataccaggcgtttccccctggaagctccctcgtgcgctctcctgttccgaccctgccgcttaccggatacctgtccgcctttctctcttcgggaagcgtggcgctttctcatagctcacgctgtaggtatctcagttcggtgtaggtcgttcgctccaagctgggctgtgtgcacgaaccccccgttcagcccgaccgctgcgccttatccggtaactatcgtcttgagtccaacccggtaagacacgacttatcgccactggcagcagccactggtaacaggattagcagagcgaggtatgtaggcggtgctacagagttcttgaagtggtggcctaactacggctacactagaagaacagtatttggtatctgcgctctgctgaagccagttaccttcggaaaaagagttggtagctcttgatccggcaaacaaaccaccgctggtagcggtggtttttttgtttgcaagcagcagattacgcgcagaaaaaaaggatctcaagaagatcctttgatcttttctacggggtctgacgctcagtggaacgaaaactcacgttaagggattttggtcatgagattatcaaaaaggatcttcacctagatccttttaaattaaaaatgaagttttaaatcaatctaaagtatatatgagtaaacttggtctgacagttaccaatgcttaatcagtgaggcacctatctcagcgatctgtctatttcgttcatccatagttgcctgactccccgtcgtgtagataactacgatacgggagggcttaccatctggccccagtgctgcaatgataccgcgagacccacgctcaccggctccagatttatcagcaataaaccagccagccggaagggccgagcgcagaagtggtcctgcaactttatccgcctccatccagtctattaattgttgccgggaagctagagtaagtagttcgccagttaatagtttgcgcaacgttgttgccattgctacaggcatcgtggtgtcacgctcgtcgtttggtatggcttcattcagctccggttcccaacgatcaaggcgagttacatgatcccccatgttgtgcaaaaaagcggttagctccttcggtcctccgatcgttgtcagaagtaagttggccgcagtgttatcactcatggttatggcagcactgcataattctcttactgtcatgccatccgtaagatgcttttctgtgactggtgagtactcaaccaagtcattctgagaatagtgtatgcggcgaccgagttgctcttgcccggcgtcaatacgggataataccgcgccacatagcagaactttaaaagtgctcatcattggaaaacgttcttcggggcgaaaactctcaaggatcttaccgctgttgagatccagttcgatgtaacccactcgtgcacccaactgatcttcagcatcttttactttcaccagcgtttctgggtgagcaaaaacaggaaggcaaaatgccgcaaaaaagggaataagggcgacacggaaatgttgaatactcatactcttcctttttcaatattattgaagcatttatcagggttattgtctcatgagcggatacatatttgaatgtatttagaaaaataaacaaataggggttccgcgcacatttccccgaaaagtgccacctgacgtctaagaaaccattattatcatgacattaacctataaaaataggcgtatcacgaggccctttcgtcggcgcgccgcggccgc

SEQ ID NO: 724 - DNA, 4624 bp, synthetic construct
  source 1..4624: mol_type = other DNA
caactttgtatagaaaagttggagggcctatttcccatgattccttcatatttgcatatacgatacaaggctgttagagagataattggaattaatttgactgtaaacacaaagatattagtacaaaatacgtgacgtagaaagtaataatttcttgggtagtttgcagttttaaaattatgttttaaaatggactatcatatgcttaccgtaacttgaaagtatttcgatttcttggctttatatatcttgtggaaaggacgaaacaccgtgcacacctcctggcgggcagctctgctgctgctacaacagctgctgtgttctggcaatacctgcagcagcagaagaagcagcagcagggaggcctgccctgactgcccactttttgtttttcaagtttgtacaaaaaagcaggctgggttgcgccttttccaaggcagccctgggtttgcgcagggacgcggctgctctgggcgtggttccgggaaacgcagcggcgccgaccctgggtctcgcacattcttcacgtccgttcgcagcgtcacccggatcttcgccgctacccttgtgggccccccggcgacgcttcctgctccgcccctaagtcgggaaggttccttgcggttcgcggcgtgccggacgtgacaaacggaagccgcacgtctcactagtaccctcgcagacggacagcgccagggagcaatggcagcgcgccgaccgcgatgggctgtggccaatagcggctgctcagcagggcgcgccgagagcagcggccgggaaggggcggtgcgggaggcggggtgtggggcggtagtgtgggccctgttcctgcccgcgcggtgttccgcattctgcaagcctccggagcgcacgtcggcagtcggctccctcgttgaccgaatcaccgacctctctccccaggacccagctttcttgtacaaagtgggccaccatggtgagcaagggcgaggagctgttcaccggggtggtgcccatcctggtcgagctggacggcgacgtaaacggccacaagttcagcgtgtccggcgagggcgagggcgatgccacctacggcaagctgaccctgaagttcatctgcaccaccggcaagctgcccgtgccctggcccaccctcgtgaccaccctgacctacggcgtgcagtgcttcagccgctaccccgaccacatgaagcagcacgacttcttcaagtccgccatgcccgaaggctacgtccaggagcgcaccatcttcttcaaggacgacggcaactacaagacccgcgccgaggtgaagttcgagggcgacaccctggtgaaccgcatcgagctgaagggcatcgacttcaaggaggacggcaacatcctggggcacaagctggagtacaactacaacagccacaacgtctatatcatggccgacaagcagaagaacggcatcaaggtgaacttcaagatccgccacaacatcgaggacggcagcgtgcagctcgccgaccactaccagcagaacacccccatcggcgacggccccgtgctgctgcccgacaaccactacctgagcacccagtccgccctgagcaaagaccccaacgagaagcgcgatcacatggtcctgctggagttcgtgaccgccgccgggatcactctcggcatggacgagctgtacaagggaagcggagagggcaggggaagtcttctaacatgcggggacgtggaggaaaatcccggccccatgaccgagtacaagcccacggtgcgcctcgccacccgcgacgacgtccccagggccgtacgcaccctcgccgccgcgttcgccgactaccccgccacgcgccacaccgtcgatccggaccgccacatcgagcgggtcaccgagctgcaagaactcttcctcacgcgcgtcgggctcgacatcggcaaggtgtgggtcgcggacgacggcgccgcggtggcggtctggaccacgccggagagcgtcgaagcgggggcggtgttcgccgagatcggcccgcgcatggccgagttgagcggttcccggctggccgcgcagcaacagatggaaggcctcctggcgccgcaccggcccaaggagcccgcgtggttcctggccaccgtcggcgtctcgcccgaccaccagggcaagggtctgggcagcgccgtcgtgctccccggagtggaggcggccgagcgcgccggggtgcccgccttcctggagacctccgcgccccgcaacctccccttctacgagcggctcggcttcaccgtcaccgccgacgtcgaggtgcccgaaggaccgcgcacctggtgcatgacccgcaagcccggtgcctgacaactttattatacatagttgatggccggccgcttcgagcagacatgataagatacattgatgagtttggacaaaccacaactagaatgcagtgaaaaaaatgctttatttgtgaaatttgtgatgctattgctttatttgtaaccattataagctgcaataaacaagttaacaacaacaattgcattcattttatgtttcaggttcagggggaggtgtgggaggttttttaaagcaagtaaaacctctacaaatgtggtagcggccgcggcgctcttccgcttcctcgctcactgactcgctgcgctcggtcgttcggctgcggcgagcggtatcagctcactcaaaggcggtaatacggttatccacagaatcaggggataacgcaggaaagaacatgtgagcaaaaggccagcaaaaggccaggaaccgtaaaaaggccgcgttgctggcgtttttccataggctccgcccccctgacgagcatcacaaaaatcgacgctcaagtcagaggtggcgaaacccgacaggactataaagataccaggcgtttccccctggaagctccctcgtgcgctctcctgttccgaccctgccgcttaccggatacctgtccgcctttctctcttcgggaagcgtggcgctttctcatagctcacgctgtaggtatctcagttcggtgtaggtcgttcgctccaagctgggctgtgtgcacgaaccccccgttcagcccgaccgctgcgccttatccggtaactatcgtcttgagtccaacccggtaagacacgacttatcgccactggcagcagccactggtaacaggattagcagagcgaggtatgtaggcggtgctacagagttcttgaagtggtggcctaactacggctacactagaagaacagtatttggtatctgcgctctgctgaagccagttaccttcggaaaaagagttggtagctcttgatccggcaaacaaaccaccgctggtagcggtggtttttttgtttgcaagcagcagattacgcgcagaaaaaaaggatctcaagaagatcctttgatcttttctacggggtctgacgctcagtggaacgaaaactcacgttaagggattttggtcatgagattatcaaaaaggatcttcacctagatccttttaaattaaaaatgaagttttaaatcaatctaaagtatatatgagtaaacttggtctgacagttaccaatgcttaatcagtgaggcacctatctcagcgatctgtctatttcgttcatccatagttgcctgactccccgtcgtgtagataactacgatacgggagggcttaccatctggccccagtgctgcaatgataccgcgagacccacgctcaccggctccagatttatcagcaataaaccagccagccggaagggccgagcgcagaagtggtcctgcaactttatccgcctccatccagtctattaattgttgccgggaagctagagtaagtagttcgccagttaatagtttgcgcaacgttgttgccattgctacaggcatcgtggtgtcacgctcgtcgtttggtatggcttcattcagctccggttcccaacgatcaaggcgagttacatgatcccccatgttgtgcaaaaaagcggttagctccttcggtcctccgatcgttgtcagaagtaagttggccgcagtgttatcactcatggttatggcagcactgcataattctcttactgtcatgccatccgtaagatgcttttctgtgactggtgagtactcaaccaagtcattctgagaatagtgtatgcggcgaccgagttgctcttgcccggcgtcaatacgggataataccgcgccacatagcagaactttaaaagtgctcatcattggaaaacgttcttcggggcgaaaactctcaaggatcttaccgctgttgagatccagttcgatgtaacccactcgtgcacccaactgatcttcagcatcttttactttcaccagcgtttctgggtgagcaaaaacaggaaggcaaaatgccgcaaaaaagggaataagggcgacacggaaatgttgaatactcatactcttcctttttcaatattattgaagcatttatcagggttattgtctcatgagcggatacatatttgaatgtatttagaaaaataaacaaataggggttccgcgcacatttccccgaaaagtgccacctgacgtctaagaaaccattattatcatgacattaacctataaaaataggcgtatcacgaggccctttcgtcggcgcgccgcggccgc

SEQ ID NO: 725 - DNA, 4624 bp, synthetic construct
  source 1..4624: mol_type = other DNA
caactttgtatagaaaagttggagggcctatttcccatgattccttcatatttgcatatacgatacaaggctgttagagagataattggaattaatttgactgtaaacacaaagatattagtacaaaatacgtgacgtagaaagtaataatttcttgggtagtttgcagttttaaaattatgttttaaaatggactatcatatgcttaccgtaacttgaaagtatttcgatttcttggctttatatatcttgtggaaaggacgaaacaccgtgcacacctcctggcgggcagctctgctgctgctacaactactgctgtgttctggcaatacctgcagcagaagaagaagcagcagcagggaggcctgccctgactgcccactttttgtttttcaagtttgtacaaaaaagcaggctgggttgcgccttttccaaggcagccctgggtttgcgcagggacgcggctgctctgggcgtggttccgggaaacgcagcggcgccgaccctgggtctcgcacattcttcacgtccgttcgcagcgtcacccggatcttcgccgctacccttgtgggccccccggcgacgcttcctgctccgcccctaagtcgggaaggttccttgcggttcgcggcgtgccggacgtgacaaacggaagccgcacgtctcactagtaccctcgcagacggacagcgccagggagcaatggcagcgcgccgaccgcgatgggctgtggccaatagcggctgctcagcagggcgcgccgagagcagcggccgggaaggggcggtgcgggaggcggggtgtggggcggtagtgtgggccctgttcctgcccgcgcggtgttccgcattctgcaagcctccggagcgcacgtcggcagtcggctccctcgttgaccgaatcaccgacctctctccccaggacccagctttcttgtacaaagtgggccaccatggtgagcaagggcgaggagctgttcaccggggtggtgcccatcctggtcgagctggacggcgacgtaaacggccacaagttcagcgtgtccggcgagggcgagggcgatgccacctacggcaagctgaccctgaagttcatctgcaccaccggcaagctgcccgtgccctggcccaccctcgtgaccaccctgacctacggcgtgcagtgcttcagccgctaccccgaccacatgaagcagcacgacttcttcaagtccgccatgcccgaaggctacgtccaggagcgcaccatcttcttcaaggacgacggcaactacaagacccgcgccgaggtgaagttcgagggcgacaccctggtgaaccgcatcgagctgaagggcatcgacttcaaggaggacggcaacatcctggggcacaagctggagtacaactacaacagccacaacgtctatatcatggccgacaagcagaagaacggcatcaaggtgaacttcaagatccgccacaacatcgaggacggcagcgtgcagctcgccgaccactaccagcagaacacccccatcggcgacggccccgtgctgctgcccgacaaccactacctgagcacccagtccgccctgagcaaagaccccaacgagaagcgcgatcacatggtcctgctggagttcgtgaccgccgccgggatcactctcggcatggacgagctgtacaagggaagcggagagggcaggggaagtcttctaacatgcggggacgtggaggaaaatcccggccccatgaccgagtacaagcccacggtgcgcctcgccacccgcgacgacgtccccagggccgtacgcaccctcgccgccgcgttcgccgactaccccgccacgcgccacaccgtcgatccggaccgccacatcgagcgggtcaccgagctgcaagaactcttcctcacgcgcgtcgggctcgacatcggcaaggtgtgggtcgcggacgacggcgccgcggtggcggtctggaccacgccggagagcgtcgaagcgggggcggtgttcgccgagatcggcccgcgcatggccgagttgagcggttcccggctggccgcgcagcaacagatggaaggcctcctggcgccgcaccggcccaaggagcccgcgtggttcctggccaccgtcggcgtctcgcccgaccaccagggcaagggtctgggcagcgccgtcgtgctccccggagtggaggcggccgagcgcgccggggtgcccgccttcctggagacctccgcgccccgcaacctccccttctacgagcggctcggcttcaccgtcaccgccgacgtcgaggtgcccgaaggaccgcgcacctggtgcatgacccgcaagcccggtgcctgacaactttattatacatagttgatggccggccgcttcgagcagacatgataagatacattgatgagtttggacaaaccacaactagaatgcagtgaaaaaaatgctttatttgtgaaatttgtgatgctattgctttatttgtaaccattataagctgcaataaacaagttaacaacaacaattgcattcattttatgtttcaggttcagggggaggtgtgggaggttttttaaagcaagtaaaacctctacaaatgtggtagcggccgcggcgctcttccgcttcctcgctcactgactcgctgcgctcggtcgttcggctgcggcgagcggtatcagctcactcaaaggcggtaatacggttatccacagaatcaggggataacgcaggaaagaacatgtgagcaaaaggccagcaaaaggccaggaaccgtaaaaaggccgcgttgctggcgtttttccataggctccgcccccctgacgagcatcacaaaaatcgacgctcaagtcagaggtggcgaaacccgacaggactataaagataccaggcgtttccccctggaagctccctcgtgcgctctcctgttccgaccctgccgcttaccggatacctgtccgcctttctctcttcgggaagcgtggcgctttctcatagctcacgctgtaggtatctcagttcggtgtaggtcgttcgctccaagctgggctgtgtgcacgaaccccccgttcagcccgaccgctgcgccttatccggtaactatcgtcttgagtccaacccggtaagacacgacttatcgccactggcagcagccactggtaacaggattagcagagcgaggtatgtaggcggtgctacagagttcttgaagtggtggcctaactacggctacactagaagaacagtatttggtatctgcgctctgctgaagccagttaccttcggaaaaagagttggtagctcttgatccggcaaacaaaccaccgctggtagcggtggtttttttgtttgcaagcagcagattacgcgcagaaaaaaaggatctcaagaagatcctttgatcttttctacggggtctgacgctcagtggaacgaaaactcacgttaagggattttggtcatgagattatcaaaaaggatcttcacctagatccttttaaattaaaaatgaagttttaaatcaatctaaagtatatatgagtaaacttggtctgacagttaccaatgcttaatcagtgaggcacctatctcagcgatctgtctatttcgttcatccatagttgcctgactccccgtcgtgtagataactacgatacgggagggcttaccatctggccccagtgctgcaatgataccgcgagacccacgctcaccggctccagatttatcagcaataaaccagccagccggaagggccgagcgcagaagtggtcctgcaactttatccgcctccatccagtctattaattgttgccgggaagctagagtaagtagttcgccagttaatagtttgcgcaacgttgttgccattgctacaggcatcgtggtgtcacgctcgtcgtttggtatggcttcattcagctccggttcccaacgatcaaggcgagttacatgatcccccatgttgtgcaaaaaagcggttagctccttcggtcctccgatcgttgtcagaagtaagttggccgcagtgttatcactcatggttatggcagcactgcataattctcttactgtcatgccatccgtaagatgcttttctgtgactggtgagtactcaaccaagtcattctgagaatagtgtatgcggcgaccgagttgctcttgcccggcgtcaatacgggataataccgcgccacatagcagaactttaaaagtgctcatcattggaaaacgttcttcggggcgaaaactctcaaggatcttaccgctgttgagatccagttcgatgtaacccactcgtgcacccaactgatcttcagcatcttttactttcaccagcgtttctgggtgagcaaaaacaggaaggcaaaatgccgcaaaaaagggaataagggcgacacggaaatgttgaatactcatactcttcctttttcaatattattgaagcatttatcagggttattgtctcatgagcggatacatatttgaatgtatttagaaaaataaacaaataggggttccgcgcacatttccccgaaaagtgccacctgacgtctaagaaaccattattatcatgacattaacctataaaaataggcgtatcacgaggccctttcgtcggcgcgccgcggccgc

SEQ ID NO: 726 - DNA, 4624 bp, synthetic construct
  source 1..4624: mol_type = other DNA
caactttgtatagaaaagttggagggcctatttcccatgattccttcatatttgcatatacgatacaaggctgttagagagataattggaattaatttgactgtaaacacaaagatattagtacaaaatacgtgacgtagaaagtaataatttcttgggtagtttgcagttttaaaattatgttttaaaatggactatcatatgcttaccgtaacttgaaagtatttcgatttcttggctttatatatcttgtggaaaggacgaaacaccgtgcacacctcctggcgggcagctctgctgctgctacaactgatgctgtgttctggcaatacctgcagcaacagaagaagcagcagcagggaggcctgccctgactgcccactttttgtttttcaagtttgtacaaaaaagcaggctgggttgcgccttttccaaggcagccctgggtttgcgcagggacgcggctgctctgggcgtggttccgggaaacgcagcggcgccgaccctgggtctcgcacattcttcacgtccgttcgcagcgtcacccggatcttcgccgctacccttgtgggccccccggcgacgcttcctgctccgcccctaagtcgggaaggttccttgcggttcgcggcgtgccggacgtgacaaacggaagccgcacgtctcactagtaccctcgcagacggacagcgccagggagcaatggcagcgcgccgaccgcgatgggctgtggccaatagcggctgctcagcagggcgcgccgagagcagcggccgggaaggggcggtgcgggaggcggggtgtggggcggtagtgtgggccctgttcctgcccgcgcggtgttccgcattctgcaagcctccggagcgcacgtcggcagtcggctccctcgttgaccgaatcaccgacctctctccccaggacccagctttcttgtacaaagtgggccaccatggtgagcaagggcgaggagctgttcaccggggtggtgcccatcctggtcgagctggacggcgacgtaaacggccacaagttcagcgtgtccggcgagggcgagggcgatgccacctacggcaagctgaccctgaagttcatctgcaccaccggcaagctgcccgtgccctggcccaccctcgtgaccaccctgacctacggcgtgcagtgcttcagccgctaccccgaccacatgaagcagcacgacttcttcaagtccgccatgcccgaaggctacgtccaggagcgcaccatcttcttcaaggacgacggcaactacaagacccgcgccgaggtgaagttcgagggcgacaccctggtgaaccgcatcgagctgaagggcatcgacttcaaggaggacggcaacatcctggggcacaagctggagtacaactacaacagccacaacgtctatatcatggccgacaagcagaagaacggcatcaaggtgaacttcaagatccgccacaacatcgaggacggcagcgtgcagctcgccgaccactaccagcagaacacccccatcggcgacggccccgtgctgctgcccgacaaccactacctgagcacccagtccgccctgagcaaagaccccaacgagaagcgcgatcacatggtcctgctggagttcgtgaccgccgccgggatcactctcggcatggacgagctgtacaagggaagcggagagggcaggggaagtcttctaacatgcggggacgtggaggaaaatcccggccccatgaccgagtacaagcccacggtgcgcctcgccacccgcgacgacgtccccagggccgtacgcaccctcgccgccgcgttcgccgactaccccgccacgcgccacaccgtcgatccggaccgccacatcgagcgggtcaccgagctgcaagaactcttcctcacgcgcgtcgggctcgacatcggcaaggtgtgggtcgcggacgacggcgccgcggtggcggtctggaccacgccggagagcgtcgaagcgggggcggtgttcgccgagatcggcccgcgcatggccgagttgagcggttcccggctggccgcgcagcaacagatggaaggcctcctggcgccgcaccggcccaaggagcccgcgtggttcctggccaccgtcggcgtctcgcccgaccaccagggcaagggtctgggcagcgccgtcgtgctccccggagtggaggcggccgagcgcgccggggtgcccgccttcctggagacctccgcgccccgcaacctccccttctacgagcggctcggcttcaccgtcaccgccgacgtcgaggtgcccgaaggaccgcgcacctggtgcatgacccgcaagcccggtgcctgacaactttattatacatagttgatggccggccgcttcgagcagacatgataagatacattgatgagtttggacaaaccacaactagaatgcagtgaaaaaaatgctttatttgtgaaatttgtgatgctattgctttatttgtaaccattataagctgcaataaacaagttaacaacaacaattgcattcattttatgtttcaggttcagggggaggtgtgggaggttttttaaagcaagtaaaacctctacaaatgtggtagcggccgcggcgctcttccgcttcctcgctcactgactcgctgcgctcggtcgttcggctgcggcgagcggtatcagctcactcaaaggcggtaatacggttatccacagaatcaggggataacgcaggaaagaacatgtgagcaaaaggccagcaaaaggccaggaaccgtaaaaaggccgcgttgctggcgtttttccataggctccgcccccctgacgagcatcacaaaaatcgacgctcaagtcagaggtggcgaaacccgacaggactataaagataccaggcgtttccccctggaagctccctcgtgcgctctcctgttccgaccctgccgcttaccggatacctgtccgcctttctctcttcgggaagcgtggcgctttctcatagctcacgctgtaggtatctcagttcggtgtaggtcgttcgctccaagctgggctgtgtgcacgaaccccccgttcagcccgaccgctgcgccttatccggtaactatcgtcttgagtccaacccggtaagacacgacttatcgccactggcagcagccactggtaacaggattagcagagcgaggtatgtaggcggtgctacagagttcttgaagtggtggcctaactacggctacactagaagaacagtatttggtatctgcgctctgctgaagccagttaccttcggaaaaagagttggtagctcttgatccggcaaacaaaccaccgctggtagcggtggtttttttgtttgcaagcagcagattacgcgcagaaaaaaaggatctcaagaagatcctttgatcttttctacggggtctgacgctcagtggaacgaaaactcacgttaagggattttggtcatgagattatcaaaaaggatcttcacctagatccttttaaattaaaaatgaagttttaaatcaatctaaagtatatatgagtaaacttggtctgacagttaccaatgcttaatcagtgaggcacctatctcagcgatctgtctatttcgttcatccatagttgcctgactccccgtcgtgtagataactacgatacgggagggcttaccatctggccccagtgctgcaatgataccgcgagacccacgctcaccggctccagatttatcagcaataaaccagccagccggaagggccgagcgcagaagtggtcctgcaactttatccgcctccatccagtctattaattgttgccgggaagctagagtaagtagttcgccagttaatagtttgcgcaacgttgttgccattgctacaggcatcgtggtgtcacgctcgtcgtttggtatggcttcattcagctccggttcccaacgatcaaggcgagttacatgatcccccatgttgtgcaaaaaagcggttagctccttcggtcctccgatcgttgtcagaagtaagttggccgcagtgttatcactcatggttatggcagcactgcataattctcttactgtcatgccatccgtaagatgcttttctgtgactggtgagtactcaaccaagtcattctgagaatagtgtatgcggcgaccgagttgctcttgcccggcgtcaatacgggataataccgcgccacatagcagaactttaaaagtgctcatcattggaaaacgttcttcggggcgaaaactctcaaggatcttaccgctgttgagatccagttcgatgtaacccactcgtgcacccaactgatcttcagcatcttttactttcaccagcgtttctgggtgagcaaaaacaggaaggcaaaatgccgcaaaaaagggaataagggcgacacggaaatgttgaatactcatactcttcctttttcaatattattgaagcatttatcagggttattgtctcatgagcggatacatatttgaatgtatttagaaaaataaacaaataggggttccgcgcacatttccccgaaaagtgccacctgacgtctaagaaaccattattatcatgacattaacctataaaaataggcgtatcacgaggccctttcgtcggcgcgccgcggccgc

SEQ ID NO: 727 - DNA, 4624 bp, synthetic construct
  source 1..4624: mol_type = other DNA
caactttgtatagaaaagttggagggcctatttcccatgattccttcatatttgcatatacgatacaaggctgttagagagataattggaattaatttgactgtaaacacaaagatattagtacaaaatacgtgacgtagaaagtaataatttcttgggtagtttgcagttttaaaattatgttttaaaatggactatcatatgcttaccgtaacttgaaagtatttcgatttcttggctttatatatcttgtggaaaggacgaaacaccgtgcacacctcctggcgggcagctctgctgctgctacagatactgctgtgttctggcaatacctgcagcagaaacagaagcagcagcagggaggcctgccctgactgcccactttttgtttttcaagtttgtacaaaaaagcaggctgggttgcgccttttccaaggcagccctgggtttgcgcagggacgcggctgctctgggcgtggttccgggaaacgcagcggcgccgaccctgggtctcgcacattcttcacgtccgttcgcagcgtcacccggatcttcgccgctacccttgtgggccccccggcgacgcttcctgctccgcccctaagtcgggaaggttccttgcggttcgcggcgtgccggacgtgacaaacggaagccgcacgtctcactagtaccctcgcagacggacagcgccagggagcaatggcagcgcgccgaccgcgatgggctgtggccaatagcggctgctcagcagggcgcgccgagagcagcggccgggaaggggcggtgcgggaggcggggtgtggggcggtagtgtgggccctgttcctgcccgcgcggtgttccgcattctgcaagcctccggagcgcacgtcggcagtcggctccctcgttgaccgaatcaccgacctctctccccaggacccagctttcttgtacaaagtgggccaccatggtgagcaagggcgaggagctgttcaccggggtggtgcccatcctggtcgagctggacggcgacgtaaacggccacaagttcagcgtgtccggcgagggcgagggcgatgccacctacggcaagctgaccctgaagttcatctgcaccaccggcaagctgcccgtgccctggcccaccctcgtgaccaccctgacctacggcgtgcagtgcttcagccgctaccccgaccacatgaagcagcacgacttcttcaagtccgccatgcccgaaggctacgtccaggagcgcaccatcttcttcaaggacgacggcaactacaagacccgcgccgaggtgaagttcgagggcgacaccctggtgaaccgcatcgagctgaagggcatcgacttcaaggaggacggcaacatcctggggcacaagctggagtacaactacaacagccacaacgtctatatcatggccgacaagcagaagaacggcatcaaggtgaacttcaagatccgccacaacatcgaggacggcagcgtgcagctcgccgaccactaccagcagaacacccccatcggcgacggccccgtgctgctgcccgacaaccactacctgagcacccagtccgccctgagcaaagaccccaacgagaagcgcgatcacatggtcctgctggagttcgtgaccgccgccgggatcactctcggcatggacgagctgtacaagggaagcggagagggcaggggaagtcttctaacatgcggggacgtggaggaaaatcccggccccatgaccgagtacaagcccacggtgcgcctcgccacccgcgacgacgtccccagggccgtacgcaccctcgccgccgcgttcgccgactaccccgccacgcgccacaccgtcgatccggaccgccacatcgagcgggtcaccgagctgcaagaactcttcctcacgcgcgtcgggctcgacatcggcaaggtgtgggtcgcggacgacggcgccgcggtggcggtctggaccacgccggagagcgtcgaagcgggggcggtgttcgccgagatcggcccgcgcatggccgagttgagcggttcccggctggccgcgcagcaacagatggaaggcctcctggcgccgcaccggcccaaggagcccgcgtggttcctggccaccgtcggcgtctcgcccgaccaccagggcaagggtctgggcagcgccgtcgtgctccccggagtggaggcggccgagcgcgccggggtgcccgccttcctggagacctccgcgccccgcaacctccccttctacgagcggctcggcttcaccgtcaccgccgacgtcgaggtgcccgaaggaccgcgcacctggtgcatgacccgcaagcccggtgcctgacaactttattatacatagttgatggccggccgcttcgagcagacatgataagatacattgatgagtttggacaaaccacaactagaatgcagtgaaaaaaatgctttatttgtgaaatttgtgatgctattgctttatttgtaaccattataagctgcaataaacaagttaacaacaacaattgcattcattttatgtttcaggttcagggggaggtgtgggaggttttttaaagcaagtaaaacctctacaaatgtggtagcggccgcggcgctcttccgcttcctcgctcactgactcgctgcgctcggtcgttcggctgcggcgagcggtatcagctcactcaaaggcggtaatacggttatccacagaatcaggggataacgcaggaaagaacatgtgagcaaaaggccagcaaaaggccaggaaccgtaaaaaggccgcgttgctggcgtttttccataggctccgcccccctgacgagcatcacaaaaatcgacgctcaagtcagaggtggcgaaacccgacaggactataaagataccaggcgtttccccctggaagctccctcgtgcgctctcctgttccgaccctgccgcttaccggatacctgtccgcctttctctcttcgggaagcgtggcgctttctcatagctcacgctgtaggtatctcagttcggtgtaggtcgttcgctccaagctgggctgtgtgcacgaaccccccgttcagcccgaccgctgcgccttatccggtaactatcgtcttgagtccaacccggtaagacacgacttatcgccactggcagcagccactggtaacaggattagcagagcgaggtatgtaggcggtgctacagagttcttgaagtggtggcctaactacggctacactagaagaacagtatttggtatctgcgctctgctgaagccagttaccttcggaaaaagagttggtagctcttgatccggcaaacaaaccaccgctggtagcggtggtttttttgtttgcaagcagcagattacgcgcagaaaaaaaggatctcaagaagatcctttgatcttttctacggggtctgacgctcagtggaacgaaaactcacgttaagggattttggtcatgagattatcaaaaaggatcttcacctagatccttttaaattaaaaatgaagttttaaatcaatctaaagtatatatgagtaaacttggtctgacagttaccaatgcttaatcagtgaggcacctatctcagcgatctgtctatttcgttcatccatagttgcctgactccccgtcgtgtagataactacgatacgggagggcttaccatctggccccagtgctgcaatgataccgcgagacccacgctcaccggctccagatttatcagcaataaaccagccagccggaagggccgagcgcagaagtggtcctgcaactttatccgcctccatccagtctattaattgttgccgggaagctagagtaagtagttcgccagttaatagtttgcgcaacgttgttgccattgctacaggcatcgtggtgtcacgctcgtcgtttggtatggcttcattcagctccggttcccaacgatcaaggcgagttacatgatcccccatgttgtgcaaaaaagcggttagctccttcggtcctccgatcgttgtcagaagtaagttggccgcagtgttatcactcatggttatggcagcactgcataattctcttactgtcatgccatccgtaagatgcttttctgtgactggtgagtactcaaccaagtcattctgagaatagtgtatgcggcgaccgagttgctcttgcccggcgtcaatacgggataataccgcgccacatagcagaactttaaaagtgctcatcattggaaaacgttcttcggggcgaaaactctcaaggatcttaccgctgttgagatccagttcgatgtaacccactcgtgcacccaactgatcttcagcatcttttactttcaccagcgtttctgggtgagcaaaaacaggaaggcaaaatgccgcaaaaaagggaataagggcgacacggaaatgttgaatactcatactcttcctttttcaatattattgaagcatttatcagggttattgtctcatgagcggatacatatttgaatgtatttagaaaaataaacaaataggggttccgcgcacatttccccgaaaagtgccacctgacgtctaagaaaccattattatcatgacattaacctataaaaataggcgtatcacgaggccctttcgtcggcgcgccgcggccgc

SEQ ID NO: 728 - DNA, 4624 bp, synthetic construct
  source 1..4624: mol_type = other DNA
caactttgtatagaaaagttggagggcctatttcccatgattccttcatatttgcatatacgatacaaggctgttagagagataattggaattaatttgactgtaaacacaaagatattagtacaaaatacgtgacgtagaaagtaataatttcttgggtagtttgcagttttaaaattatgttttaaaatggactatcatatgcttaccgtaacttgaaagtatttcgatttcttggctttatatatcttgtggaaaggacgaaacaccgtgcacacctcctggcgggcagctctgctgctgctacagcaactgctgtgttctggcaatacctgcagcagaagcagaagcagcagcagggaggcctgccctgactgcccactttttgtttttcaagtttgtacaaaaaagcaggctgggttgcgccttttccaaggcagccctgggtttgcgcagggacgcggctgctctgggcgtggttccgggaaacgcagcggcgccgaccctgggtctcgcacattcttcacgtccgttcgcagcgtcacccggatcttcgccgctacccttgtgggccccccggcgacgcttcctgctccgcccctaagtcgggaaggttccttgcggttcgcggcgtgccggacgtgacaaacggaagccgcacgtctcactagtaccctcgcagacggacagcgccagggagcaatggcagcgcgccgaccgcgatgggctgtggccaatagcggctgctcagcagggcgcgccgagagcagcggccgggaaggggcggtgcgggaggcggggtgtggggcggtagtgtgggccctgttcctgcccgcgcggtgttccgcattctgcaagcctccggagcgcacgtcggcagtcggctccctcgttgaccgaatcaccgacctctctccccaggacccagctttcttgtacaaagtgggccaccatggtgagcaagggcgaggagctgttcaccggggtggtgcccatcctggtcgagctggacggcgacgtaaacggccacaagttcagcgtgtccggcgagggcgagggcgatgccacctacggcaagctgaccctgaagttcatctgcaccaccggcaagctgcccgtgccctggcccaccctcgtgaccaccctgacctacggcgtgcagtgcttcagccgctaccccgaccacatgaagcagcacgacttcttcaagtccgccatgcccgaaggctacgtccaggagcgcaccatcttcttcaaggacgacggcaactacaagacccgcgccgaggtgaagttcgagggcgacaccctggtgaaccgcatcgagctgaagggcatcgacttcaaggaggacggcaacatcctggggcacaagctggagtacaactacaacagccacaacgtctatatcatggccgacaagcagaagaacggcatcaaggtgaacttcaagatccgccacaacatcgaggacggcagcgtgcagctcgccgaccactaccagcagaacacccccatcggcgacggccccgtgctgctgcccgacaaccactacctgagcacccagtccgccctgagcaaagaccccaacgagaagcgcgatcacatggtcctgctggagttcgtgaccgccgccgggatcactctcggcatggacgagctgtacaagggaagcggagagggcaggggaagtcttctaacatgcggggacgtggaggaaaatcccggccccatgaccgagtacaagcccacggtgcgcctcgccacccgcgacgacgtccccagggccgtacgcaccctcgccgccgcgttcgccgactaccccgccacgcgccacaccgtcgatccggaccgccacatcgagcgggtcaccgagctgcaagaactcttcctcacgcgcgtcgggctcgacatcggcaaggtgtgggtcgcggacgacggcgccgcggtggcggtctggaccacgccggagagcgtcgaagcgggggcggtgttcgccgagatcggcccgcgcatggccgagttgagcggttcccggctggccgcgcagcaacagatggaaggcctcctggcgccgcaccggcccaaggagcccgcgtggttcctggccaccgtcggcgtctcgcccgaccaccagggcaagggtctgggcagcgccgtcgtgctccccggagtggaggcggccgagcgcgccggggtgcccgccttcctggagacctccgcgccccgcaacctccccttctacgagcggctcggcttcaccgtcaccgccgacgtcgaggtgcccgaaggaccgcgcacctggtgcatgacccgcaagcccggtgcctgacaactttattatacatagttgatggccggccgcttcgagcagacatgataagatacattgatgagtttggacaaaccacaactagaatgcagtgaaaaaaatgctttatttgtgaaatttgtgatgctattgctttatttgtaaccattataagctgcaataaacaagttaacaacaacaattgcattcattttatgtttcaggttcagggggaggtgtgggaggttttttaaagcaagtaaaacctctacaaatgtggtagcggccgcggcgctcttccgcttcctcgctcactgactcgctgcgctcggtcgttcggctgcggcgagcggtatcagctcactcaaaggcggtaatacggttatccacagaatcaggggataacgcaggaaagaacatgtgagcaaaaggccagcaaaaggccaggaaccgtaaaaaggccgcgttgctggcgtttttccataggctccgcccccctgacgagcatcacaaaaatcgacgctcaagtcagaggtggcgaaacccgacaggactataaagataccaggcgtttccccctggaagctccctcgtgcgctctcctgttccgaccctgccgcttaccggatacctgtccgcctttctctcttcgggaagcgtggcgctttctcatagctcacgctgtaggtatctcagttcggtgtaggtcgttcgctccaagctgggctgtgtgcacgaaccccccgttcagcccgaccgctgcgccttatccggtaactatcgtcttgagtccaacccggtaagacacgacttatcgccactggcagcagccactggtaacaggattagcagagcgaggtatgtaggcggtgctacagagttcttgaagtggtggcctaactacggctacactagaagaacagtatttggtatctgcgctctgctgaagccagttaccttcggaaaaagagttggtagctcttgatccggcaaacaaaccaccgctggtagcggtggtttttttgtttgcaagcagcagattacgcgcagaaaaaaaggatctcaagaagatcctttgatcttttctacggggtctgacgctcagtggaacgaaaactcacgttaagggattttggtcatgagattatcaaaaaggatcttcacctagatccttttaaattaaaaatgaagttttaaatcaatctaaagtatatatgagtaaacttggtctgacagttaccaatgcttaatcagtgaggcacctatctcagcgatctgtctatttcgttcatccatagttgcctgactccccgtcgtgtagataactacgatacgggagggcttaccatctggccccagtgctgcaatgataccgcgagacccacgctcaccggctccagatttatcagcaataaaccagccagccggaagggccgagcgcagaagtggtcctgcaactttatccgcctccatccagtctattaattgttgccgggaagctagagtaagtagttcgccagttaatagtttgcgcaacgttgttgccattgctacaggcatcgtggtgtcacgctcgtcgtttggtatggcttcattcagctccggttcccaacgatcaaggcgagttacatgatcccccatgttgtgcaaaaaagcggttagctccttcggtcctccgatcgttgtcagaagtaagttggccgcagtgttatcactcatggttatggcagcactgcataattctcttactgtcatgccatccgtaagatgcttttctgtgactggtgagtactcaaccaagtcattctgagaatagtgtatgcggcgaccgagttgctcttgcccggcgtcaatacgggataataccgcgccacatagcagaactttaaaagtgctcatcattggaaaacgttcttcggggcgaaaactctcaaggatcttaccgctgttgagatccagttcgatgtaacccactcgtgcacccaactgatcttcagcatcttttactttcaccagcgtttctgggtgagcaaaaacaggaaggcaaaatgccgcaaaaaagggaataagggcgacacggaaatgttgaatactcatactcttcctttttcaatattattgaagcatttatcagggttattgtctcatgagcggatacatatttgaatgtatttagaaaaataaacaaataggggttccgcgcacatttccccgaaaagtgccacctgacgtctaagaaaccattattatcatgacattaacctataaaaataggcgtatcacgaggccctttcgtcggcgcgccgcggccgc

SEQ ID NO: 729 - DNA, 4624 bp, synthetic construct
  source 1..4624: mol_type = other DNA
caactttgtatagaaaagttggagggcctatttcccatgattccttcatatttgcatatacgatacaaggctgttagagagataattggaattaatttgactgtaaacacaaagatattagtacaaaatacgtgacgtagaaagtaataatttcttgggtagtttgcagttttaaaattatgttttaaaatggactatcatatgcttaccgtaacttgaaagtatttcgatttcttggctttatatatcttgtggaaaggacgaaacaccgtgcacacctcctggcgggcagctctgctgctgctacagctaatgctgtgttctggcaatacctgcagcaaaagcagaagcagcagcagggaggcctgccctgactgcccactttttgtttttcaagtttgtacaaaaaagcaggctgggttgcgccttttccaaggcagccctgggtttgcgcagggacgcggctgctctgggcgtggttccgggaaacgcagcggcgccgaccctgggtctcgcacattcttcacgtccgttcgcagcgtcacccggatcttcgccgctacccttgtgggccccccggcgacgcttcctgctccgcccctaagtcgggaaggttccttgcggttcgcggcgtgccggacgtgacaaacggaagccgcacgtctcactagtaccctcgcagacggacagcgccagggagcaatggcagcgcgccgaccgcgatgggctgtggccaatagcggctgctcagcagggcgcgccgagagcagcggccgggaaggggcggtgcgggaggcggggtgtggggcggtagtgtgggccctgttcctgcccgcgcggtgttccgcattctgcaagcctccggagcgcacgtcggcagtcggctccctcgttgaccgaatcaccgacctctctccccaggacccagctttcttgtacaaagtgggccaccatggtgagcaagggcgaggagctgttcaccggggtggtgcccatcctggtcgagctggacggcgacgtaaacggccacaagttcagcgtgtccggcgagggcgagggcgatgccacctacggcaagctgaccctgaagttcatctgcaccaccggcaagctgcccgtgccctggcccaccctcgtgaccaccctgacctacggcgtgcagtgcttcagccgctaccccgaccacatgaagcagcacgacttcttcaagtccgccatgcccgaaggctacgtccaggagcgcaccatcttcttcaaggacgacggcaactacaagacccgcgccgaggtgaagttcgagggcgacaccctggtgaaccgcatcgagctgaagggcatcgacttcaaggaggacggcaacatcctggggcacaagctggagtacaactacaacagccacaacgtctatatcatggccgacaagcagaagaacggcatcaaggtgaacttcaagatccgccacaacatcgaggacggcagcgtgcagctcgccgaccactaccagcagaacacccccatcggcgacggccccgtgctgctgcccgacaaccactacctgagcacccagtccgccctgagcaaagaccccaacgagaagcgcgatcacatggtcctgctggagttcgtgaccgccgccgggatcactctcggcatggacgagctgtacaagggaagcggagagggcaggggaagtcttctaacatgcggggacgtggaggaaaatcccggccccatgaccgagtacaagcccacggtgcgcctcgccacccgcgacgacgtccccagggccgtacgcaccctcgccgccgcgttcgccgactaccccgccacgcgccacaccgtcgatccggaccgccacatcgagcgggtcaccgagctgcaagaactcttcctcacgcgcgtcgggctcgacatcggcaaggtgtgggtcgcggacgacggcgccgcggtggcggtctggaccacgccggagagcgtcgaagcgggggcggtgttcgccgagatcggcccgcgcatggccgagttgagcggttcccggctggccgcgcagcaacagatggaaggcctcctggcgccgcaccggcccaaggagcccgcgtggttcctggccaccgtcggcgtctcgcccgaccaccagggcaagggtctgggcagcgccgtcgtgctccccggagtggaggcggccgagcgcgccggggtgcccgccttcctggagacctccgcgccccgcaacctccccttctacgagcggctcggcttcaccgtcaccgccgacgtcgaggtgcccgaaggaccgcgcacctggtgcatgacccgcaagcccggtgcctgacaactttattatacatagttgatggccggccgcttcgagcagacatgataagatacattgatgagtttggacaaaccacaactagaatgcagtgaaaaaaatgctttatttgtgaaatttgtgatgctattgctttatttgtaaccattataagctgcaataaacaagttaacaacaacaattgcattcattttatgtttcaggttcagggggaggtgtgggaggttttttaaagcaagtaaaacctctacaaatgtggtagcggccgcggcgctcttccgcttcctcgctcactgactcgctgcgctcggtcgttcggctgcggcgagcggtatcagctcactcaaaggcggtaatacggttatccacagaatcaggggataacgcaggaaagaacatgtgagcaaaaggccagcaaaaggccaggaaccgtaaaaaggccgcgttgctggcgtttttccataggctccgcccccctgacgagcatcacaaaaatcgacgctcaagtcagaggtggcgaaacccgacaggactataaagataccaggcgtttccccctggaagctccctcgtgcgctctcctgttccgaccctgccgcttaccggatacctgtccgcctttctctcttcgggaagcgtggcgctttctcatagctcacgctgtaggtatctcagttcggtgtaggtcgttcgctccaagctgggctgtgtgcacgaaccccccgttcagcccgaccgctgcgccttatccggtaactatcgtcttgagtccaacccggtaagacacgacttatcgccactggcagcagccactggtaacaggattagcagagcgaggtatgtaggcggtgctacagagttcttgaagtggtggcctaactacggctacactagaagaacagtatttggtatctgcgctctgctgaagccagttaccttcggaaaaagagttggtagctcttgatccggcaaacaaaccaccgctggtagcggtggtttttttgtttgcaagcagcagattacgcgcagaaaaaaaggatctcaagaagatcctttgatcttttctacggggtctgacgctcagtggaacgaaaactcacgttaagggattttggtcatgagattatcaaaaaggatcttcacctagatccttttaaattaaaaatgaagttttaaatcaatctaaagtatatatgagtaaacttggtctgacagttaccaatgcttaatcagtgaggcacctatctcagcgatctgtctatttcgttcatccatagttgcctgactccccgtcgtgtagataactacgatacgggagggcttaccatctggccccagtgctgcaatgataccgcgagacccacgctcaccggctccagatttatcagcaataaaccagccagccggaagggccgagcgcagaagtggtcctgcaactttatccgcctccatccagtctattaattgttgccgggaagctagagtaagtagttcgccagttaatagtttgcgcaacgttgttgccattgctacaggcatcgtggtgtcacgctcgtcgtttggtatggcttcattcagctccggttcccaacgatcaaggcgagttacatgatcccccatgttgtgcaaaaaagcggttagctccttcggtcctccgatcgttgtcagaagtaagttggccgcagtgttatcactcatggttatggcagcactgcataattctcttactgtcatgccatccgtaagatgcttttctgtgactggtgagtactcaaccaagtcattctgagaatagtgtatgcggcgaccgagttgctcttgcccggcgtcaatacgggataataccgcgccacatagcagaactttaaaagtgctcatcattggaaaacgttcttcggggcgaaaactctcaaggatcttaccgctgttgagatccagttcgatgtaacccactcgtgcacccaactgatcttcagcatcttttactttcaccagcgtttctgggtgagcaaaaacaggaaggcaaaatgccgcaaaaaagggaataagggcgacacggaaatgttgaatactcatactcttcctttttcaatattattgaagcatttatcagggttattgtctcatgagcggatacatatttgaatgtatttagaaaaataaacaaataggggttccgcgcacatttccccgaaaagtgccacctgacgtctaagaaaccattattatcatgacattaacctataaaaataggcgtatcacgaggccctttcgtcggcgcgccgcggccgc

SEQ ID NO: 730 - DNA, 4624 bp, synthetic construct
  source 1..4624: mol_type = other DNA
caactttgtatagaaaagttggagggcctatttcccatgattccttcatatttgcatatacgatacaaggctgttagagagataattggaattaatttgactgtaaacacaaagatattagtacaaaatacgtgacgtagaaagtaataatttcttgggtagtttgcagttttaaaattatgttttaaaatggactatcatatgcttaccgtaacttgaaagtatttcgatttcttggctttatatatcttgtggaaaggacgaaacaccgtgcacacctcctggcgggcagctctgctgctgctgaaaatgctgctgtgttctggcaatacctgcagcagcaaaaacagcagcagcagggaggcctgccctgactgcccactttttgtttttcaagtttgtacaaaaaagcaggctgggttgcgccttttccaaggcagccctgggtttgcgcagggacgcggctgctctgggcgtggttccgggaaacgcagcggcgccgaccctgggtctcgcacattcttcacgtccgttcgcagcgtcacccggatcttcgccgctacccttgtgggccccccggcgacgcttcctgctccgcccctaagtcgggaaggttccttgcggttcgcggcgtgccggacgtgacaaacggaagccgcacgtctcactagtaccctcgcagacggacagcgccagggagcaatggcagcgcgccgaccgcgatgggctgtggccaatagcggctgctcagcagggcgcgccgagagcagcggccgggaaggggcggtgcgggaggcggggtgtggggcggtagtgtgggccctgttcctgcccgcgcggtgttccgcattctgcaagcctccggagcgcacgtcggcagtcggctccctcgttgaccgaatcaccgacctctctccccaggacccagctttcttgtacaaagtgggccaccatggtgagcaagggcgaggagctgttcaccggggtggtgcccatcctggtcgagctggacggcgacgtaaacggccacaagttcagcgtgtccggcgagggcgagggcgatgccacctacggcaagctgaccctgaagttcatctgcaccaccggcaagctgcccgtgccctggcccaccctcgtgaccaccctgacctacggcgtgcagtgcttcagccgctaccccgaccacatgaagcagcacgacttcttcaagtccgccatgcccgaaggctacgtccaggagcgcaccatcttcttcaaggacgacggcaactacaagacccgcgccgaggtgaagttcgagggcgacaccctggtgaaccgcatcgagctgaagggcatcgacttcaaggaggacggcaacatcctggggcacaagctggagtacaactacaacagccacaacgtctatatcatggccgacaagcagaagaacggcatcaaggtgaacttcaagatccgccacaacatcgaggacggcagcgtgcagctcgccgaccactaccagcagaacacccccatcggcgacggccccgtgctgctgcccgacaaccactacctgagcacccagtccgccctgagcaaagaccccaacgagaagcgcgatcacatggtcctgctggagttcgtgaccgccgccgggatcactctcggcatggacgagctgtacaagggaagcggagagggcaggggaagtcttctaacatgcggggacgtggaggaaaatcccggccccatgaccgagtacaagcccacggtgcgcctcgccacccgcgacgacgtccccagggccgtacgcaccctcgccgccgcgttcgccgactaccccgccacgcgccacaccgtcgatccggaccgccacatcgagcgggtcaccgagctgcaagaactcttcctcacgcgcgtcgggctcgacatcggcaaggtgtgggtcgcggacgacggcgccgcggtggcggtctggaccacgccggagagcgtcgaagcgggggcggtgttcgccgagatcggcccgcgcatggccgagttgagcggttcccggctggccgcgcagcaacagatggaaggcctcctggcgccgcaccggcccaaggagcccgcgtggttcctggccaccgtcggcgtctcgcccgaccaccagggcaagggtctgggcagcgccgtcgtgctccccggagtggaggcggccgagcgcgccggggtgcccgccttcctggagacctccgcgccccgcaacctccccttctacgagcggctcggcttcaccgtcaccgccgacgtcgaggtgcccgaaggaccgcgcacctggtgcatgacccgcaagcccggtgcctgacaactttattatacatagttgatggccggccgcttcgagcagacatgataagatacattgatgagtttggacaaaccacaactagaatgcagtgaaaaaaatgctttatttgtgaaatttgtgatgctattgctttatttgtaaccattataagctgcaataaacaagttaacaacaacaattgcattcattttatgtttcaggttcagggggaggtgtgggaggttttttaaagcaagtaaaacctctacaaatgtggtagcggccgcggcgctcttccgcttcctcgctcactgactcgctgcgctcggtcgttcggctgcggcgagcggtatcagctcactcaaaggcggtaatacggttatccacagaatcaggggataacgcaggaaagaacatgtgagcaaaaggccagcaaaaggccaggaaccgtaaaaaggccgcgttgctggcgtttttccataggctccgcccccctgacgagcatcacaaaaatcgacgctcaagtcagaggtggcgaaacccgacaggactataaagataccaggcgtttccccctggaagctccctcgtgcgctctcctgttccgaccctgccgcttaccggatacctgtccgcctttctctcttcgggaagcgtggcgctttctcatagctcacgctgtaggtatctcagttcggtgtaggtcgttcgctccaagctgggctgtgtgcacgaaccccccgttcagcccgaccgctgcgccttatccggtaactatcgtcttgagtccaacccggtaagacacgacttatcgccactggcagcagccactggtaacaggattagcagagcgaggtatgtaggcggtgctacagagttcttgaagtggtggcctaactacggctacactagaagaacagtatttggtatctgcgctctgctgaagccagttaccttcggaaaaagagttggtagctcttgatccggcaaacaaaccaccgctggtagcggtggtttttttgtttgcaagcagcagattacgcgcagaaaaaaaggatctcaagaagatcctttgatcttttctacggggtctgacgctcagtggaacgaaaactcacgttaagggattttggtcatgagattatcaaaaaggatcttcacctagatccttttaaattaaaaatgaagttttaaatcaatctaaagtatatatgagtaaacttggtctgacagttaccaatgcttaatcagtgaggcacctatctcagcgatctgtctatttcgttcatccatagttgcctgactccccgtcgtgtagataactacgatacgggagggcttaccatctggccccagtgctgcaatgataccgcgagacccacgctcaccggctccagatttatcagcaataaaccagccagccggaagggccgagcgcagaagtggtcctgcaactttatccgcctccatccagtctattaattgttgccgggaagctagagtaagtagttcgccagttaatagtttgcgcaacgttgttgccattgctacaggcatcgtggtgtcacgctcgtcgtttggtatggcttcattcagctccggttcccaacgatcaaggcgagttacatgatcccccatgttgtgcaaaaaagcggttagctccttcggtcctccgatcgttgtcagaagtaagttggccgcagtgttatcactcatggttatggcagcactgcataattctcttactgtcatgccatccgtaagatgcttttctgtgactggtgagtactcaaccaagtcattctgagaatagtgtatgcggcgaccgagttgctcttgcccggcgtcaatacgggataataccgcgccacatagcagaactttaaaagtgctcatcattggaaaacgttcttcggggcgaaaactctcaaggatcttaccgctgttgagatccagttcgatgtaacccactcgtgcacccaactgatcttcagcatcttttactttcaccagcgtttctgggtgagcaaaaacaggaaggcaaaatgccgcaaaaaagggaataagggcgacacggaaatgttgaatactcatactcttcctttttcaatattattgaagcatttatcagggttattgtctcatgagcggatacatatttgaatgtatttagaaaaataaacaaataggggttccgcgcacatttccccgaaaagtgccacctgacgtctaagaaaccattattatcatgacattaacctataaaaataggcgtatcacgaggccctttcgtcggcgcgccgcggccgc

SEQ ID NO: 731 - DNA, 4624 bp, synthetic construct
  source 1..4624: mol_type = other DNA
caactttgtatagaaaagttggagggcctatttcccatgattccttcatatttgcatatacgatacaaggctgttagagagataattggaattaatttgactgtaaacacaaagatattagtacaaaatacgtgacgtagaaagtaataatttcttgggtagtttgcagttttaaaattatgttttaaaatggactatcatatgcttaccgtaacttgaaagtatttcgatttcttggctttatatatcttgtggaaaggacgaaacaccgtgcacacctcctggcgggcagctctgctgctgctgaaacagctgctgtgttctggcaatacctgcagcagcagaaacagcagcagcagggaggcctgccctgactgcccactttttgtttttcaagtttgtacaaaaaagcaggctgggttgcgccttttccaaggcagccctgggtttgcgcagggacgcggctgctctgggcgtggttccgggaaacgcagcggcgccgaccctgggtctcgcacattcttcacgtccgttcgcagcgtcacccggatcttcgccgctacccttgtgggccccccggcgacgcttcctgctccgcccctaagtcgggaaggttccttgcggttcgcggcgtgccggacgtgacaaacggaagccgcacgtctcactagtaccctcgcagacggacagcgccagggagcaatggcagcgcgccgaccgcgatgggctgtggccaatagcggctgctcagcagggcgcgccgagagcagcggccgggaaggggcggtgcgggaggcggggtgtggggcggtagtgtgggccctgttcctgcccgcgcggtgttccgcattctgcaagcctccggagcgcacgtcggcagtcggctccctcgttgaccgaatcaccgacctctctccccaggacccagctttcttgtacaaagtgggccaccatggtgagcaagggcgaggagctgttcaccggggtggtgcccatcctggtcgagctggacggcgacgtaaacggccacaagttcagcgtgtccggcgagggcgagggcgatgccacctacggcaagctgaccctgaagttcatctgcaccaccggcaagctgcccgtgccctggcccaccctcgtgaccaccctgacctacggcgtgcagtgcttcagccgctaccccgaccacatgaagcagcacgacttcttcaagtccgccatgcccgaaggctacgtccaggagcgcaccatcttcttcaaggacgacggcaactacaagacccgcgccgaggtgaagttcgagggcgacaccctggtgaaccgcatcgagctgaagggcatcgacttcaaggaggacggcaacatcctggggcacaagctggagtacaactacaacagccacaacgtctatatcatggccgacaagcagaagaacggcatcaaggtgaacttcaagatccgccacaacatcgaggacggcagcgtgcagctcgccgaccactaccagcagaacacccccatcggcgacggccccgtgctgctgcccgacaaccactacctgagcacccagtccgccctgagcaaagaccccaacgagaagcgcgatcacatggtcctgctggagttcgtgaccgccgccgggatcactctcggcatggacgagctgtacaagggaagcggagagggcaggggaagtcttctaacatgcggggacgtggaggaaaatcccggccccatgaccgagtacaagcccacggtgcgcctcgccacccgcgacgacgtccccagggccgtacgcaccctcgccgccgcgttcgccgactaccccgccacgcgccacaccgtcgatccggaccgccacatcgagcgggtcaccgagctgcaagaactcttcctcacgcgcgtcgggctcgacatcggcaaggtgtgggtcgcggacgacggcgccgcggtggcggtctggaccacgccggagagcgtcgaagcgggggcggtgttcgccgagatcggcccgcgcatggccgagttgagcggttcccggctggccgcgcagcaacagatggaaggcctcctggcgccgcaccggcccaaggagcccgcgtggttcctggccaccgtcggcgtctcgcccgaccaccagggcaagggtctgggcagcgccgtcgtgctccccggagtggaggcggccgagcgcgccggggtgcccgccttcctggagacctccgcgccccgcaacctccccttctacgagcggctcggcttcaccgtcaccgccgacgtcgaggtgcccgaaggaccgcgcacctggtgcatgacccgcaagcccggtgcctgacaactttattatacatagttgatggccggccgcttcgagcagacatgataagatacattgatgagtttggacaaaccacaactagaatgcagtgaaaaaaatgctttatttgtgaaatttgtgatgctattgctttatttgtaaccattataagctgcaataaacaagttaacaacaacaattgcattcattttatgtttcaggttcagggggaggtgtgggaggttttttaaagcaagtaaaacctctacaaatgtggtagcggccgcggcgctcttccgcttcctcgctcactgactcgctgcgctcggtcgttcggctgcggcgagcggtatcagctcactcaaaggcggtaatacggttatccacagaatcaggggataacgcaggaaagaacatgtgagcaaaaggccagcaaaaggccaggaaccgtaaaaaggccgcgttgctggcgtttttccataggctccgcccccctgacgagcatcacaaaaatcgacgctcaagtcagaggtggcgaaacccgacaggactataaagataccaggcgtttccccctggaagctccctcgtgcgctctcctgttccgaccctgccgcttaccggatacctgtccgcctttctctcttcgggaagcgtggcgctttctcatagctcacgctgtaggtatctcagttcggtgtaggtcgttcgctccaagctgggctgtgtgcacgaaccccccgttcagcccgaccgctgcgccttatccggtaactatcgtcttgagtccaacccggtaagacacgacttatcgccactggcagcagccactggtaacaggattagcagagcgaggtatgtaggcggtgctacagagttcttgaagtggtggcctaactacggctacactagaagaacagtatttggtatctgcgctctgctgaagccagttaccttcggaaaaagagttggtagctcttgatccggcaaacaaaccaccgctggtagcggtggtttttttgtttgcaagcagcagattacgcgcagaaaaaaaggatctcaagaagatcctttgatcttttctacggggtctgacgctcagtggaacgaaaactcacgttaagggattttggtcatgagattatcaaaaaggatcttcacctagatccttttaaattaaaaatgaagttttaaatcaatctaaagtatatatgagtaaacttggtctgacagttaccaatgcttaatcagtgaggcacctatctcagcgatctgtctatttcgttcatccatagttgcctgactccccgtcgtgtagataactacgatacgggagggcttaccatctggccccagtgctgcaatgataccgcgagacccacgctcaccggctccagatttatcagcaataaaccagccagccggaagggccgagcgcagaagtggtcctgcaactttatccgcctccatccagtctattaattgttgccgggaagctagagtaagtagttcgccagttaatagtttgcgcaacgttgttgccattgctacaggcatcgtggtgtcacgctcgtcgtttggtatggcttcattcagctccggttcccaacgatcaaggcgagttacatgatcccccatgttgtgcaaaaaagcggttagctccttcggtcctccgatcgttgtcagaagtaagttggccgcagtgttatcactcatggttatggcagcactgcataattctcttactgtcatgccatccgtaagatgcttttctgtgactggtgagtactcaaccaagtcattctgagaatagtgtatgcggcgaccgagttgctcttgcccggcgtcaatacgggataataccgcgccacatagcagaactttaaaagtgctcatcattggaaaacgttcttcggggcgaaaactctcaaggatcttaccgctgttgagatccagttcgatgtaacccactcgtgcacccaactgatcttcagcatcttttactttcaccagcgtttctgggtgagcaaaaacaggaaggcaaaatgccgcaaaaaagggaataagggcgacacggaaatgttgaatactcatactcttcctttttcaatattattgaagcatttatcagggttattgtctcatgagcggatacatatttgaatgtatttagaaaaataaacaaataggggttccgcgcacatttccccgaaaagtgccacctgacgtctaagaaaccattattatcatgacattaacctataaaaataggcgtatcacgaggccctttcgtcggcgcgccgcggccgc

SEQ ID NO: 732 - DNA, 4624 bp, synthetic construct
  source 1..4624: mol_type = other DNA
caactttgtatagaaaagttggagggcctatttcccatgattccttcatatttgcatatacgatacaaggctgttagagagataattggaattaatttgactgtaaacacaaagatattagtacaaaatacgtgacgtagaaagtaataatttcttgggtagtttgcagttttaaaattatgttttaaaatggactatcatatgcttaccgtaacttgaaagtatttcgatttcttggctttatatatcttgtggaaaggacgaaacaccgtgcacacctcctggcgggcagctctgctgctgctgaaactactgctgtgttctggcaatacctgcagcagaagaaacagcagcagcagggaggcctgccctgactgcccactttttgtttttcaagtttgtacaaaaaagcaggctgggttgcgccttttccaaggcagccctgggtttgcgcagggacgcggctgctctgggcgtggttccgggaaacgcagcggcgccgaccctgggtctcgcacattcttcacgtccgttcgcagcgtcacccggatcttcgccgctacccttgtgggccccccggcgacgcttcctgctccgcccctaagtcgggaaggttccttgcggttcgcggcgtgccggacgtgacaaacggaagccgcacgtctcactagtaccctcgcagacggacagcgccagggagcaatggcagcgcgccgaccgcgatgggctgtggccaatagcggctgctcagcagggcgcgccgagagcagcggccgggaaggggcggtgcgggaggcggggtgtggggcggtagtgtgggccctgttcctgcccgcgcggtgttccgcattctgcaagcctccggagcgcacgtcggcagtcggctccctcgttgaccgaatcaccgacctctctccccaggacccagctttcttgtacaaagtgggccaccatggtgagcaagggcgaggagctgttcaccggggtggtgcccatcctggtcgagctggacggcgacgtaaacggccacaagttcagcgtgtccggcgagggcgagggcgatgccacctacggcaagctgaccctgaagttcatctgcaccaccggcaagctgcccgtgccctggcccaccctcgtgaccaccctgacctacggcgtgcagtgcttcagccgctaccccgaccacatgaagcagcacgacttcttcaagtccgccatgcccgaaggctacgtccaggagcgcaccatcttcttcaaggacgacggcaactacaagacccgcgccgaggtgaagttcgagggcgacaccctggtgaaccgcatcgagctgaagggcatcgacttcaaggaggacggcaacatcctggggcacaagctggagtacaactacaacagccacaacgtctatatcatggccgacaagcagaagaacggcatcaaggtgaacttcaagatccgccacaacatcgaggacggcagcgtgcagctcgccgaccactaccagcagaacacccccatcggcgacggccccgtgctgctgcccgacaaccactacctgagcacccagtccgccctgagcaaagaccccaacgagaagcgcgatcacatggtcctgctggagttcgtgaccgccgccgggatcactctcggcatggacgagctgtacaagggaagcggagagggcaggggaagtcttctaacatgcggggacgtggaggaaaatcccggccccatgaccgagtacaagcccacggtgcgcctcgccacccgcgacgacgtccccagggccgtacgcaccctcgccgccgcgttcgccgactaccccgccacgcgccacaccgtcgatccggaccgccacatcgagcgggtcaccgagctgcaagaactcttcctcacgcgcgtcgggctcgacatcggcaaggtgtgggtcgcggacgacggcgccgcggtggcggtctggaccacgccggagagcgtcgaagcgggggcggtgttcgccgagatcggcccgcgcatggccgagttgagcggttcccggctggccgcgcagcaacagatggaaggcctcctggcgccgcaccggcccaaggagcccgcgtggttcctggccaccgtcggcgtctcgcccgaccaccagggcaagggtctgggcagcgccgtcgtgctccccggagtggaggcggccgagcgcgccggggtgcccgccttcctggagacctccgcgccccgcaacctccccttctacgagcggctcggcttcaccgtcaccgccgacgtcgaggtgcccgaaggaccgcgcacctggtgcatgacccgcaagcccggtgcctgacaactttattatacatagttgatggccggccgcttcgagcagacatgataagatacattgatgagtttggacaaaccacaactagaatgcagtgaaaaaaatgctttatttgtgaaatttgtgatgctattgctttatttgtaaccattataagctgcaataaacaagttaacaacaacaattgcattcattttatgtttcaggttcagggggaggtgtgggaggttttttaaagcaagtaaaacctctacaaatgtggtagcggccgcggcgctcttccgcttcctcgctcactgactcgctgcgctcggtcgttcggctgcggcgagcggtatcagctcactcaaaggcggtaatacggttatccacagaatcaggggataacgcaggaaagaacatgtgagcaaaaggccagcaaaaggccaggaaccgtaaaaaggccgcgttgctggcgtttttccataggctccgcccccctgacgagcatcacaaaaatcgacgctcaagtcagaggtggcgaaacccgacaggactataaagataccaggcgtttccccctggaagctccctcgtgcgctctcctgttccgaccctgccgcttaccggatacctgtccgcctttctctcttcgggaagcgtggcgctttctcatagctcacgctgtaggtatctcagttcggtgtaggtcgttcgctccaagctgggctgtgtgcacgaaccccccgttcagcccgaccgctgcgccttatccggtaactatcgtcttgagtccaacccggtaagacacgacttatcgccactggcagcagccactggtaacaggattagcagagcgaggtatgtaggcggtgctacagagttcttgaagtggtggcctaactacggctacactagaagaacagtatttggtatctgcgctctgctgaagccagttaccttcggaaaaagagttggtagctcttgatccggcaaacaaaccaccgctggtagcggtggtttttttgtttgcaagcagcagattacgcgcagaaaaaaaggatctcaagaagatcctttgatcttttctacggggtctgacgctcagtggaacgaaaactcacgttaagggattttggtcatgagattatcaaaaaggatcttcacctagatccttttaaattaaaaatgaagttttaaatcaatctaaagtatatatgagtaaacttggtctgacagttaccaatgcttaatcagtgaggcacctatctcagcgatctgtctatttcgttcatccatagttgcctgactccccgtcgtgtagataactacgatacgggagggcttaccatctggccccagtgctgcaatgataccgcgagacccacgctcaccggctccagatttatcagcaataaaccagccagccggaagggccgagcgcagaagtggtcctgcaactttatccgcctccatccagtctattaattgttgccgggaagctagagtaagtagttcgccagttaatagtttgcgcaacgttgttgccattgctacaggcatcgtggtgtcacgctcgtcgtttggtatggcttcattcagctccggttcccaacgatcaaggcgagttacatgatcccccatgttgtgcaaaaaagcggttagctccttcggtcctccgatcgttgtcagaagtaagttggccgcagtgttatcactcatggttatggcagcactgcataattctcttactgtcatgccatccgtaagatgcttttctgtgactggtgagtactcaaccaagtcattctgagaatagtgtatgcggcgaccgagttgctcttgcccggcgtcaatacgggataataccgcgccacatagcagaactttaaaagtgctcatcattggaaaacgttcttcggggcgaaaactctcaaggatcttaccgctgttgagatccagttcgatgtaacccactcgtgcacccaactgatcttcagcatcttttactttcaccagcgtttctgggtgagcaaaaacaggaaggcaaaatgccgcaaaaaagggaataagggcgacacggaaatgttgaatactcatactcttcctttttcaatattattgaagcatttatcagggttattgtctcatgagcggatacatatttgaatgtatttagaaaaataaacaaataggggttccgcgcacatttccccgaaaagtgccacctgacgtctaagaaaccattattatcatgacattaacctataaaaataggcgtatcacgaggccctttcgtcggcgcgccgcggccgc

SEQ ID NO: 733 - DNA, 4624 bp, synthetic construct
  source 1..4624: mol_type = other DNA
caactttgtatagaaaagttggagggcctatttcccatgattccttcatatttgcatatacgatacaaggctgttagagagataattggaattaatttgactgtaaacacaaagatattagtacaaaatacgtgacgtagaaagtaataatttcttgggtagtttgcagttttaaaattatgttttaaaatggactatcatatgcttaccgtaacttgaaagtatttcgatttcttggctttatatatcttgtggaaaggacgaaacaccgtgcacacctcctggcgggcagctctgctgctgctgaaactgatgctgtgttctggcaatacctgcagcaacagaaacagcagcagcagggaggcctgccctgactgcccactttttgtttttcaagtttgtacaaaaaagcaggctgggttgcgccttttccaaggcagccctgggtttgcgcagggacgcggctgctctgggcgtggttccgggaaacgcagcggcgccgaccctgggtctcgcacattcttcacgtccgttcgcagcgtcacccggatcttcgccgctacccttgtgggccccccggcgacgcttcctgctccgcccctaagtcgggaaggttccttgcggttcgcggcgtgccggacgtgacaaacggaagccgcacgtctcactagtaccctcgcagacggacagcgccagggagcaatggcagcgcgccgaccgcgatgggctgtggccaatagcggctgctcagcagggcgcgccgagagcagcggccgggaaggggcggtgcgggaggcggggtgtggggcggtagtgtgggccctgttcctgcccgcgcggtgttccgcattctgcaagcctccggagcgcacgtcggcagtcggctccctcgttgaccgaatcaccgacctctctccccaggacccagctttcttgtacaaagtgggccaccatggtgagcaagggcgaggagctgttcaccggggtggtgcccatcctggtcgagctggacggcgacgtaaacggccacaagttcagcgtgtccggcgagggcgagggcgatgccacctacggcaagctgaccctgaagttcatctgcaccaccggcaagctgcccgtgccctggcccaccctcgtgaccaccctgacctacggcgtgcagtgcttcagccgctaccccgaccacatgaagcagcacgacttcttcaagtccgccatgcccgaaggctacgtccaggagcgcaccatcttcttcaaggacgacggcaactacaagacccgcgccgaggtgaagttcgagggcgacaccctggtgaaccgcatcgagctgaagggcatcgacttcaaggaggacggcaacatcctggggcacaagctggagtacaactacaacagccacaacgtctatatcatggccgacaagcagaagaacggcatcaaggtgaacttcaagatccgccacaacatcgaggacggcagcgtgcagctcgccgaccactaccagcagaacacccccatcggcgacggccccgtgctgctgcccgacaaccactacctgagcacccagtccgccctgagcaaagaccccaacgagaagcgcgatcacatggtcctgctggagttcgtgaccgccgccgggatcactctcggcatggacgagctgtacaagggaagcggagagggcaggggaagtcttctaacatgcggggacgtggaggaaaatcccggccccatgaccgagtacaagcccacggtgcgcctcgccacccgcgacgacgtccccagggccgtacgcaccctcgccgccgcgttcgccgactaccccgccacgcgccacaccgtcgatccggaccgccacatcgagcgggtcaccgagctgcaagaactcttcctcacgcgcgtcgggctcgacatcggcaaggtgtgggtcgcggacgacggcgccgcggtggcggtctggaccacgccggagagcgtcgaagcgggggcggtgttcgccgagatcggcccgcgcatggccgagttgagcggttcccggctggccgcgcagcaacagatggaaggcctcctggcgccgcaccggcccaaggagcccgcgtggttcctggccaccgtcggcgtctcgcccgaccaccagggcaagggtctgggcagcgccgtcgtgctccccggagtggaggcggccgagcgcgccggggtgcccgccttcctggagacctccgcgccccgcaacctccccttctacgagcggctcggcttcaccgtcaccgccgacgtcgaggtgcccgaaggaccgcgcacctggtgcatgacccgcaagcccggtgcctgacaactttattatacatagttgatggccggccgcttcgagcagacatgataagatacattgatgagtttggacaaaccacaactagaatgcagtgaaaaaaatgctttatttgtgaaatttgtgatgctattgctttatttgtaaccattataagctgcaataaacaagttaacaacaacaattgcattcattttatgtttcaggttcagggggaggtgtgggaggttttttaaagcaagtaaaacctctacaaatgtggtagcggccgcggcgctcttccgcttcctcgctcactgactcgctgcgctcggtcgttcggctgcggcgagcggtatcagctcactcaaaggcggtaatacggttatccacagaatcaggggataacgcaggaaagaacatgtgagcaaaaggccagcaaaaggccaggaaccgtaaaaaggccgcgttgctggcgtttttccataggctccgcccccctgacgagcatcacaaaaatcgacgctcaagtcagaggtggcgaaacccgacaggactataaagataccaggcgtttccccctggaagctccctcgtgcgctctcctgttccgaccctgccgcttaccggatacctgtccgcctttctctcttcgggaagcgtggcgctttctcatagctcacgctgtaggtatctcagttcggtgtaggtcgttcgctccaagctgggctgtgtgcacgaaccccccgttcagcccgaccgctgcgccttatccggtaactatcgtcttgagtccaacccggtaagacacgacttatcgccactggcagcagccactggtaacaggattagcagagcgaggtatgtaggcggtgctacagagttcttgaagtggtggcctaactacggctacactagaagaacagtatttggtatctgcgctctgctgaagccagttaccttcggaaaaagagttggtagctcttgatccggcaaacaaaccaccgctggtagcggtggtttttttgtttgcaagcagcagattacgcgcagaaaaaaaggatctcaagaagatcctttgatcttttctacggggtctgacgctcagtggaacgaaaactcacgttaagggattttggtcatgagattatcaaaaaggatcttcacctagatccttttaaattaaaaatgaagttttaaatcaatctaaagtatatatgagtaaacttggtctgacagttaccaatgcttaatcagtgaggcacctatctcagcgatctgtctatttcgttcatccatagttgcctgactccccgtcgtgtagataactacgatacgggagggcttaccatctggccccagtgctgcaatgataccgcgagacccacgctcaccggctccagatttatcagcaataaaccagccagccggaagggccgagcgcagaagtggtcctgcaactttatccgcctccatccagtctattaattgttgccgggaagctagagtaagtagttcgccagttaatagtttgcgcaacgttgttgccattgctacaggcatcgtggtgtcacgctcgtcgtttggtatggcttcattcagctccggttcccaacgatcaaggcgagttacatgatcccccatgttgtgcaaaaaagcggttagctccttcggtcctccgatcgttgtcagaagtaagttggccgcagtgttatcactcatggttatggcagcactgcataattctcttactgtcatgccatccgtaagatgcttttctgtgactggtgagtactcaaccaagtcattctgagaatagtgtatgcggcgaccgagttgctcttgcccggcgtcaatacgggataataccgcgccacatagcagaactttaaaagtgctcatcattggaaaacgttcttcggggcgaaaactctcaaggatcttaccgctgttgagatccagttcgatgtaacccactcgtgcacccaactgatcttcagcatcttttactttcaccagcgtttctgggtgagcaaaaacaggaaggcaaaatgccgcaaaaaagggaataagggcgacacggaaatgttgaatactcatactcttcctttttcaatattattgaagcatttatcagggttattgtctcatgagcggatacatatttgaatgtatttagaaaaataaacaaataggggttccgcgcacatttccccgaaaagtgccacctgacgtctaagaaaccattattatcatgacattaacctataaaaataggcgtatcacgaggccctttcgtcggcgcgccgcggccgc

SEQ ID NO: 734 - DNA, 4624 bp, synthetic construct
  source 1..4624: mol_type = other DNA
caactttgtatagaaaagttggagggcctatttcccatgattccttcatatttgcatatacgatacaaggctgttagagagataattggaattaatttgactgtaaacacaaagatattagtacaaaatacgtgacgtagaaagtaataatttcttgggtagtttgcagttttaaaattatgttttaaaatggactatcatatgcttaccgtaacttgaaagtatttcgatttcttggctttatatatcttgtggaaaggacgaaacaccgtgcacacctcctggcgggcagctctgctgctgctgaagaagctgctgtgttctggcaatacctgcagcagcaacaacagcagcagcagggaggcctgccctgactgcccactttttgtttttcaagtttgtacaaaaaagcaggctgggttgcgccttttccaaggcagccctgggtttgcgcagggacgcggctgctctgggcgtggttccgggaaacgcagcggcgccgaccctgggtctcgcacattcttcacgtccgttcgcagcgtcacccggatcttcgccgctacccttgtgggccccccggcgacgcttcctgctccgcccctaagtcgggaaggttccttgcggttcgcggcgtgccggacgtgacaaacggaagccgcacgtctcactagtaccctcgcagacggacagcgccagggagcaatggcagcgcgccgaccgcgatgggctgtggccaatagcggctgctcagcagggcgcgccgagagcagcggccgggaaggggcggtgcgggaggcggggtgtggggcggtagtgtgggccctgttcctgcccgcgcggtgttccgcattctgcaagcctccggagcgcacgtcggcagtcggctccctcgttgaccgaatcaccgacctctctccccaggacccagctttcttgtacaaagtgggccaccatggtgagcaagggcgaggagctgttcaccggggtggtgcccatcctggtcgagctggacggcgacgtaaacggccacaagttcagcgtgtccggcgagggcgagggcgatgccacctacggcaagctgaccctgaagttcatctgcaccaccggcaagctgcccgtgccctggcccaccctcgtgaccaccctgacctacggcgtgcagtgcttcagccgctaccccgaccacatgaagcagcacgacttcttcaagtccgccatgcccgaaggctacgtccaggagcgcaccatcttcttcaaggacgacggcaactacaagacccgcgccgaggtgaagttcgagggcgacaccctggtgaaccgcatcgagctgaagggcatcgacttcaaggaggacggcaacatcctggggcacaagctggagtacaactacaacagccacaacgtctatatcatggccgacaagcagaagaacggcatcaaggtgaacttcaagatccgccacaacatcgaggacggcagcgtgcagctcgccgaccactaccagcagaacacccccatcggcgacggccccgtgctgctgcccgacaaccactacctgagcacccagtccgccctgagcaaagaccccaacgagaagcgcgatcacatggtcctgctggagttcgtgaccgccgccgggatcactctcggcatggacgagctgtacaagggaagcggagagggcaggggaagtcttctaacatgcggggacgtggaggaaaatcccggccccatgaccgagtacaagcccacggtgcgcctcgccacccgcgacgacgtccccagggccgtacgcaccctcgccgccgcgttcgccgactaccccgccacgcgccacaccgtcgatccggaccgccacatcgagcgggtcaccgagctgcaagaactcttcctcacgcgcgtcgggctcgacatcggcaaggtgtgggtcgcggacgacggcgccgcggtggcggtctggaccacgccggagagcgtcgaagcgggggcggtgttcgccgagatcggcccgcgcatggccgagttgagcggttcccggctggccgcgcagcaacagatggaaggcctcctggcgccgcaccggcccaaggagcccgcgtggttcctggccaccgtcggcgtctcgcccgaccaccagggcaagggtctgggcagcgccgtcgtgctccccggagtggaggcggccgagcgcgccggggtgcccgccttcctggagacctccgcgccccgcaacctccccttctacgagcggctcggcttcaccgtcaccgccgacgtcgaggtgcccgaaggaccgcgcacctggtgcatgacccgcaagcccggtgcctgacaactttattatacatagttgatggccggccgcttcgagcagacatgataagatacattgatgagtttggacaaaccacaactagaatgcagtgaaaaaaatgctttatttgtgaaatttgtgatgctattgctttatttgtaaccattataagctgcaataaacaagttaacaacaacaattgcattcattttatgtttcaggttcagggggaggtgtgggaggttttttaaagcaagtaaaacctctacaaatgtggtagcggccgcggcgctcttccgcttcctcgctcactgactcgctgcgctcggtcgttcggctgcggcgagcggtatcagctcactcaaaggcggtaatacggttatccacagaatcaggggataacgcaggaaagaacatgtgagcaaaaggccagcaaaaggccaggaaccgtaaaaaggccgcgttgctggcgtttttccataggctccgcccccctgacgagcatcacaaaaatcgacgctcaagtcagaggtggcgaaacccgacaggactataaagataccaggcgtttccccctggaagctccctcgtgcgctctcctgttccgaccctgccgcttaccggatacctgtccgcctttctctcttcgggaagcgtggcgctttctcatagctcacgctgtaggtatctcagttcggtgtaggtcgttcgctccaagctgggctgtgtgcacgaaccccccgttcagcccgaccgctgcgccttatccggtaactatcgtcttgagtccaacccggtaagacacgacttatcgccactggcagcagccactggtaacaggattagcagagcgaggtatgtaggcggtgctacagagttcttgaagtggtggcctaactacggctacactagaagaacagtatttggtatctgcgctctgctgaagccagttaccttcggaaaaagagttggtagctcttgatccggcaaacaaaccaccgctggtagcggtggtttttttgtttgcaagcagcagattacgcgcagaaaaaaaggatctcaagaagatcctttgatcttttctacggggtctgacgctcagtggaacgaaaactcacgttaagggattttggtcatgagattatcaaaaaggatcttcacctagatccttttaaattaaaaatgaagttttaaatcaatctaaagtatatatgagtaaacttggtctgacagttaccaatgcttaatcagtgaggcacctatctcagcgatctgtctatttcgttcatccatagttgcctgactccccgtcgtgtagataactacgatacgggagggcttaccatctggccccagtgctgcaatgataccgcgagacccacgctcaccggctccagatttatcagcaataaaccagccagccggaagggccgagcgcagaagtggtcctgcaactttatccgcctccatccagtctattaattgttgccgggaagctagagtaagtagttcgccagttaatagtttgcgcaacgttgttgccattgctacaggcatcgtggtgtcacgctcgtcgtttggtatggcttcattcagctccggttcccaacgatcaaggcgagttacatgatcccccatgttgtgcaaaaaagcggttagctccttcggtcctccgatcgttgtcagaagtaagttggccgcagtgttatcactcatggttatggcagcactgcataattctcttactgtcatgccatccgtaagatgcttttctgtgactggtgagtactcaaccaagtcattctgagaatagtgtatgcggcgaccgagttgctcttgcccggcgtcaatacgggataataccgcgccacatagcagaactttaaaagtgctcatcattggaaaacgttcttcggggcgaaaactctcaaggatcttaccgctgttgagatccagttcgatgtaacccactcgtgcacccaactgatcttcagcatcttttactttcaccagcgtttctgggtgagcaaaaacaggaaggcaaaatgccgcaaaaaagggaataagggcgacacggaaatgttgaatactcatactcttcctttttcaatattattgaagcatttatcagggttattgtctcatgagcggatacatatttgaatgtatttagaaaaataaacaaataggggttccgcgcacatttccccgaaaagtgccacctgacgtctaagaaaccattattatcatgacattaacctataaaaataggcgtatcacgaggccctttcgtcggcgcgccgcggccgc

SEQ ID NO: 735 - DNA, 4624 bp, synthetic construct
  source 1..4624: mol_type = other DNA
caactttgtatagaaaagttggagggcctatttcccatgattccttcatatttgcatatacgatacaaggctgttagagagataattggaattaatttgactgtaaacacaaagatattagtacaaaatacgtgacgtagaaagtaataatttcttgggtagtttgcagttttaaaattatgttttaaaatggactatcatatgcttaccgtaacttgaaagtatttcgatttcttggctttatatatcttgtggaaaggacgaaacaccgtgcacacctcctggcgggcagctctgctgctgctgaagatgatgctgtgttctggcaatacctgcagcaacaacaacagcagcagcagggaggcctgccctgactgcccactttttgtttttcaagtttgtacaaaaaagcaggctgggttgcgccttttccaaggcagccctgggtttgcgcagggacgcggctgctctgggcgtggttccgggaaacgcagcggcgccgaccctgggtctcgcacattcttcacgtccgttcgcagcgtcacccggatcttcgccgctacccttgtgggccccccggcgacgcttcctgctccgcccctaagtcgggaaggttccttgcggttcgcggcgtgccggacgtgacaaacggaagccgcacgtctcactagtaccctcgcagacggacagcgccagggagcaatggcagcgcgccgaccgcgatgggctgtggccaatagcggctgctcagcagggcgcgccgagagcagcggccgggaaggggcggtgcgggaggcggggtgtggggcggtagtgtgggccctgttcctgcccgcgcggtgttccgcattctgcaagcctccggagcgcacgtcggcagtcggctccctcgttgaccgaatcaccgacctctctccccaggacccagctttcttgtacaaagtgggccaccatggtgagcaagggcgaggagctgttcaccggggtggtgcccatcctggtcgagctggacggcgacgtaaacggccacaagttcagcgtgtccggcgagggcgagggcgatgccacctacggcaagctgaccctgaagttcatctgcaccaccggcaagctgcccgtgccctggcccaccctcgtgaccaccctgacctacggcgtgcagtgcttcagccgctaccccgaccacatgaagcagcacgacttcttcaagtccgccatgcccgaaggctacgtccaggagcgcaccatcttcttcaaggacgacggcaactacaagacccgcgccgaggtgaagttcgagggcgacaccctggtgaaccgcatcgagctgaagggcatcgacttcaaggaggacggcaacatcctggggcacaagctggagtacaactacaacagccacaacgtctatatcatggccgacaagcagaagaacggcatcaaggtgaacttcaagatccgccacaacatcgaggacggcagcgtgcagctcgccgaccactaccagcagaacacccccatcggcgacggccccgtgctgctgcccgacaaccactacctgagcacccagtccgccctgagcaaagaccccaacgagaagcgcgatcacatggtcctgctggagttcgtgaccgccgccgggatcactctcggcatggacgagctgtacaagggaagcggagagggcaggggaagtcttctaacatgcggggacgtggaggaaaatcccggccccatgaccgagtacaagcccacggtgcgcctcgccacccgcgacgacgtccccagggccgtacgcaccctcgccgccgcgttcgccgactaccccgccacgcgccacaccgtcgatccggaccgccacatcgagcgggtcaccgagctgcaagaactcttcctcacgcgcgtcgggctcgacatcggcaaggtgtgggtcgcggacgacggcgccgcggtggcggtctggaccacgccggagagcgtcgaagcgggggcggtgttcgccgagatcggcccgcgcatggccgagttgagcggttcccggctggccgcgcagcaacagatggaaggcctcctggcgccgcaccggcccaaggagcccgcgtggttcctggccaccgtcggcgtctcgcccgaccaccagggcaagggtctgggcagcgccgtcgtgctccccggagtggaggcggccgagcgcgccggggtgcccgccttcctggagacctccgcgccccgcaacctccccttctacgagcggctcggcttcaccgtcaccgccgacgtcgaggtgcccgaaggaccgcgcacctggtgcatgacccgcaagcccggtgcctgacaactttattatacatagttgatggccggccgcttcgagcagacatgataagatacattgatgagtttggacaaaccacaactagaatgcagtgaaaaaaatgctttatttgtgaaatttgtgatgctattgctttatttgtaaccattataagctgcaataaacaagttaacaacaacaattgcattcattttatgtttcaggttcagggggaggtgtgggaggttttttaaagcaagtaaaacctctacaaatgtggtagcggccgcggcgctcttccgcttcctcgctcactgactcgctgcgctcggtcgttcggctgcggcgagcggtatcagctcactcaaaggcggtaatacggttatccacagaatcaggggataacgcaggaaagaacatgtgagcaaaaggccagcaaaaggccaggaaccgtaaaaaggccgcgttgctggcgtttttccataggctccgcccccctgacgagcatcacaaaaatcgacgctcaagtcagaggtggcgaaacccgacaggactataaagataccaggcgtttccccctggaagctccctcgtgcgctctcctgttccgaccctgccgcttaccggatacctgtccgcctttctctcttcgggaagcgtggcgctttctcatagctcacgctgtaggtatctcagttcggtgtaggtcgttcgctccaagctgggctgtgtgcacgaaccccccgttcagcccgaccgctgcgccttatccggtaactatcgtcttgagtccaacccggtaagacacgacttatcgccactggcagcagccactggtaacaggattagcagagcgaggtatgtaggcggtgctacagagttcttgaagtggtggcctaactacggctacactagaagaacagtatttggtatctgcgctctgctgaagccagttaccttcggaaaaagagttggtagctcttgatccggcaaacaaaccaccgctggtagcggtggtttttttgtttgcaagcagcagattacgcgcagaaaaaaaggatctcaagaagatcctttgatcttttctacggggtctgacgctcagtggaacgaaaactcacgttaagggattttggtcatgagattatcaaaaaggatcttcacctagatccttttaaattaaaaatgaagttttaaatcaatctaaagtatatatgagtaaacttggtctgacagttaccaatgcttaatcagtgaggcacctatctcagcgatctgtctatttcgttcatccatagttgcctgactccccgtcgtgtagataactacgatacgggagggcttaccatctggccccagtgctgcaatgataccgcgagacccacgctcaccggctccagatttatcagcaataaaccagccagccggaagggccgagcgcagaagtggtcctgcaactttatccgcctccatccagtctattaattgttgccgggaagctagagtaagtagttcgccagttaatagtttgcgcaacgttgttgccattgctacaggcatcgtggtgtcacgctcgtcgtttggtatggcttcattcagctccggttcccaacgatcaaggcgagttacatgatcccccatgttgtgcaaaaaagcggttagctccttcggtcctccgatcgttgtcagaagtaagttggccgcagtgttatcactcatggttatggcagcactgcataattctcttactgtcatgccatccgtaagatgcttttctgtgactggtgagtactcaaccaagtcattctgagaatagtgtatgcggcgaccgagttgctcttgcccggcgtcaatacgggataataccgcgccacatagcagaactttaaaagtgctcatcattggaaaacgttcttcggggcgaaaactctcaaggatcttaccgctgttgagatccagttcgatgtaacccactcgtgcacccaactgatcttcagcatcttttactttcaccagcgtttctgggtgagcaaaaacaggaaggcaaaatgccgcaaaaaagggaataagggcgacacggaaatgttgaatactcatactcttcctttttcaatattattgaagcatttatcagggttattgtctcatgagcggatacatatttgaatgtatttagaaaaataaacaaataggggttccgcgcacatttccccgaaaagtgccacctgacgtctaagaaaccattattatcatgacattaacctataaaaataggcgtatcacgaggccctttcgtcggcgcgccgcggccgc

SEQ ID NO: 736 - DNA, 4624 bp, synthetic construct
  source 1..4624: mol_type = other DNA
caactttgtatagaaaagttggagggcctatttcccatgattccttcatatttgcatatacgatacaaggctgttagagagataattggaattaatttgactgtaaacacaaagatattagtacaaaatacgtgacgtagaaagtaataatttcttgggtagtttgcagttttaaaattatgttttaaaatggactatcatatgcttaccgtaacttgaaagtatttcgatttcttggctttatatatcttgtggaaaggacgaaacaccgtgcacacctcctggcgggcagctctgctgctgctgaagcagatgctgtgttctggcaatacctgcagcaacagcaacagcagcagcagggaggcctgccctgactgcccactttttgtttttcaagtttgtacaaaaaagcaggctgggttgcgccttttccaaggcagccctgggtttgcgcagggacgcggctgctctgggcgtggttccgggaaacgcagcggcgccgaccctgggtctcgcacattcttcacgtccgttcgcagcgtcacccggatcttcgccgctacccttgtgggccccccggcgacgcttcctgctccgcccctaagtcgggaaggttccttgcggttcgcggcgtgccggacgtgacaaacggaagccgcacgtctcactagtaccctcgcagacggacagcgccagggagcaatggcagcgcgccgaccgcgatgggctgtggccaatagcggctgctcagcagggcgcgccgagagcagcggccgggaaggggcggtgcgggaggcggggtgtggggcggtagtgtgggccctgttcctgcccgcgcggtgttccgcattctgcaagcctccggagcgcacgtcggcagtcggctccctcgttgaccgaatcaccgacctctctccccaggacccagctttcttgtacaaagtgggccaccatggtgagcaagggcgaggagctgttcaccggggtggtgcccatcctggtcgagctggacggcgacgtaaacggccacaagttcagcgtgtccggcgagggcgagggcgatgccacctacggcaagctgaccctgaagttcatctgcaccaccggcaagctgcccgtgccctggcccaccctcgtgaccaccctgacctacggcgtgcagtgcttcagccgctaccccgaccacatgaagcagcacgacttcttcaagtccgccatgcccgaaggctacgtccaggagcgcaccatcttcttcaaggacgacggcaactacaagacccgcgccgaggtgaagttcgagggcgacaccctggtgaaccgcatcgagctgaagggcatcgacttcaaggaggacggcaacatcctggggcacaagctggagtacaactacaacagccacaacgtctatatcatggccgacaagcagaagaacggcatcaaggtgaacttcaagatccgccacaacatcgaggacggcagcgtgcagctcgccgaccactaccagcagaacacccccatcggcgacggccccgtgctgctgcccgacaaccactacctgagcacccagtccgccctgagcaaagaccccaacgagaagcgcgatcacatggtcctgctggagttcgtgaccgccgccgggatcactctcggcatggacgagctgtacaagggaagcggagagggcaggggaagtcttctaacatgcggggacgtggaggaaaatcccggccccatgaccgagtacaagcccacggtgcgcctcgccacccgcgacgacgtccccagggccgtacgcaccctcgccgccgcgttcgccgactaccccgccacgcgccacaccgtcgatccggaccgccacatcgagcgggtcaccgagctgcaagaactcttcctcacgcgcgtcgggctcgacatcggcaaggtgtgggtcgcggacgacggcgccgcggtggcggtctggaccacgccggagagcgtcgaagcgggggcggtgttcgccgagatcggcccgcgcatggccgagttgagcggttcccggctggccgcgcagcaacagatggaaggcctcctggcgccgcaccggcccaaggagcccgcgtggttcctggccaccgtcggcgtctcgcccgaccaccagggcaagggtctgggcagcgccgtcgtgctccccggagtggaggcggccgagcgcgccggggtgcccgccttcctggagacctccgcgccccgcaacctccccttctacgagcggctcggcttcaccgtcaccgccgacgtcgaggtgcccgaaggaccgcgcacctggtgcatgacccgcaagcccggtgcctgacaactttattatacatagttgatggccggccgcttcgagcagacatgataagatacattgatgagtttggacaaaccacaactagaatgcagtgaaaaaaatgctttatttgtgaaatttgtgatgctattgctttatttgtaaccattataagctgcaataaacaagttaacaacaacaattgcattcattttatgtttcaggttcagggggaggtgtgggaggttttttaaagcaagtaaaacctctacaaatgtggtagcggccgcggcgctcttccgcttcctcgctcactgactcgctgcgctcggtcgttcggctgcggcgagcggtatcagctcactcaaaggcggtaatacggttatccacagaatcaggggataacgcaggaaagaacatgtgagcaaaaggccagcaaaaggccaggaaccgtaaaaaggccgcgttgctggcgtttttccataggctccgcccccctgacgagcatcacaaaaatcgacgctcaagtcagaggtggcgaaacccgacaggactataaagataccaggcgtttccccctggaagctccctcgtgcgctctcctgttccgaccctgccgcttaccggatacctgtccgcctttctctcttcgggaagcgtggcgctttctcatagctcacgctgtaggtatctcagttcggtgtaggtcgttcgctccaagctgggctgtgtgcacgaaccccccgttcagcccgaccgctgcgccttatccggtaactatcgtcttgagtccaacccggtaagacacgacttatcgccactggcagcagccactggtaacaggattagcagagcgaggtatgtaggcggtgctacagagttcttgaagtggtggcctaactacggctacactagaagaacagtatttggtatctgcgctctgctgaagccagttaccttcggaaaaagagttggtagctcttgatccggcaaacaaaccaccgctggtagcggtggtttttttgtttgcaagcagcagattacgcgcagaaaaaaaggatctcaagaagatcctttgatcttttctacggggtctgacgctcagtggaacgaaaactcacgttaagggattttggtcatgagattatcaaaaaggatcttcacctagatccttttaaattaaaaatgaagttttaaatcaatctaaagtatatatgagtaaacttggtctgacagttaccaatgcttaatcagtgaggcacctatctcagcgatctgtctatttcgttcatccatagttgcctgactccccgtcgtgtagataactacgatacgggagggcttaccatctggccccagtgctgcaatgataccgcgagacccacgctcaccggctccagatttatcagcaataaaccagccagccggaagggccgagcgcagaagtggtcctgcaactttatccgcctccatccagtctattaattgttgccgggaagctagagtaagtagttcgccagttaatagtttgcgcaacgttgttgccattgctacaggcatcgtggtgtcacgctcgtcgtttggtatggcttcattcagctccggttcccaacgatcaaggcgagttacatgatcccccatgttgtgcaaaaaagcggttagctccttcggtcctccgatcgttgtcagaagtaagttggccgcagtgttatcactcatggttatggcagcactgcataattctcttactgtcatgccatccgtaagatgcttttctgtgactggtgagtactcaaccaagtcattctgagaatagtgtatgcggcgaccgagttgctcttgcccggcgtcaatacgggataataccgcgccacatagcagaactttaaaagtgctcatcattggaaaacgttcttcggggcgaaaactctcaaggatcttaccgctgttgagatccagttcgatgtaacccactcgtgcacccaactgatcttcagcatcttttactttcaccagcgtttctgggtgagcaaaaacaggaaggcaaaatgccgcaaaaaagggaataagggcgacacggaaatgttgaatactcatactcttcctttttcaatattattgaagcatttatcagggttattgtctcatgagcggatacatatttgaatgtatttagaaaaataaacaaataggggttccgcgcacatttccccgaaaagtgccacctgacgtctaagaaaccattattatcatgacattaacctataaaaataggcgtatcacgaggccctttcgtcggcgcgccgcggccgc

SEQ ID NO: 737 - DNA, 4624 bp, synthetic construct
  source 1..4624: mol_type = other DNA
caactttgtatagaaaagttggagggcctatttcccatgattccttcatatttgcatatacgatacaaggctgttagagagataattggaattaatttgactgtaaacacaaagatattagtacaaaatacgtgacgtagaaagtaataatttcttgggtagtttgcagttttaaaattatgttttaaaatggactatcatatgcttaccgtaacttgaaagtatttcgatttcttggctttatatatcttgtggaaaggacgaaacaccgtgcacacctcctggcgggcagctctgctgctgctgaagctaatgctgtgttctggcaatacctgcagcaaaagcaacagcagcagcagggaggcctgccctgactgcccactttttgtttttcaagtttgtacaaaaaagcaggctgggttgcgccttttccaaggcagccctgggtttgcgcagggacgcggctgctctgggcgtggttccgggaaacgcagcggcgccgaccctgggtctcgcacattcttcacgtccgttcgcagcgtcacccggatcttcgccgctacccttgtgggccccccggcgacgcttcctgctccgcccctaagtcgggaaggttccttgcggttcgcggcgtgccggacgtgacaaacggaagccgcacgtctcactagtaccctcgcagacggacagcgccagggagcaatggcagcgcgccgaccgcgatgggctgtggccaatagcggctgctcagcagggcgcgccgagagcagcggccgggaaggggcggtgcgggaggcggggtgtggggcggtagtgtgggccctgttcctgcccgcgcggtgttccgcattctgcaagcctccggagcgcacgtcggcagtcggctccctcgttgaccgaatcaccgacctctctccccaggacccagctttcttgtacaaagtgggccaccatggtgagcaagggcgaggagctgttcaccggggtggtgcccatcctggtcgagctggacggcgacgtaaacggccacaagttcagcgtgtccggcgagggcgagggcgatgccacctacggcaagctgaccctgaagttcatctgcaccaccggcaagctgcccgtgccctggcccaccctcgtgaccaccctgacctacggcgtgcagtgcttcagccgctaccccgaccacatgaagcagcacgacttcttcaagtccgccatgcccgaaggctacgtccaggagcgcaccatcttcttcaaggacgacggcaactacaagacccgcgccgaggtgaagttcgagggcgacaccctggtgaaccgcatcgagctgaagggcatcgacttcaaggaggacggcaacatcctggggcacaagctggagtacaactacaacagccacaacgtctatatcatggccgacaagcagaagaacggcatcaaggtgaacttcaagatccgccacaacatcgaggacggcagcgtgcagctcgccgaccactaccagcagaacacccccatcggcgacggccccgtgctgctgcccgacaaccactacctgagcacccagtccgccctgagcaaagaccccaacgagaagcgcgatcacatggtcctgctggagttcgtgaccgccgccgggatcactctcggcatggacgagctgtacaagggaagcggagagggcaggggaagtcttctaacatgcggggacgtggaggaaaatcccggccccatgaccgagtacaagcccacggtgcgcctcgccacccgcgacgacgtccccagggccgtacgcaccctcgccgccgcgttcgccgactaccccgccacgcgccacaccgtcgatccggaccgccacatcgagcgggtcaccgagctgcaagaactcttcctcacgcgcgtcgggctcgacatcggcaaggtgtgggtcgcggacgacggcgccgcggtggcggtctggaccacgccggagagcgtcgaagcgggggcggtgttcgccgagatcggcccgcgcatggccgagttgagcggttcccggctggccgcgcagcaacagatggaaggcctcctggcgccgcaccggcccaaggagcccgcgtggttcctggccaccgtcggcgtctcgcccgaccaccagggcaagggtctgggcagcgccgtcgtgctccccggagtggaggcggccgagcgcgccggggtgcccgccttcctggagacctccgcgccccgcaacctccccttctacgagcggctcggcttcaccgtcaccgccgacgtcgaggtgcccgaaggaccgcgcacctggtgcatgacccgcaagcccggtgcctgacaactttattatacatagttgatggccggccgcttcgagcagacatgataagatacattgatgagtttggacaaaccacaactagaatgcagtgaaaaaaatgctttatttgtgaaatttgtgatgctattgctttatttgtaaccattataagctgcaataaacaagttaacaacaacaattgcattcattttatgtttcaggttcagggggaggtgtgggaggttttttaaagcaagtaaaacctctacaaatgtggtagcggccgcggcgctcttccgcttcctcgctcactgactcgctgcgctcggtcgttcggctgcggcgagcggtatcagctcactcaaaggcggtaatacggttatccacagaatcaggggataacgcaggaaagaacatgtgagcaaaaggccagcaaaaggccaggaaccgtaaaaaggccgcgttgctggcgtttttccataggctccgcccccctgacgagcatcacaaaaatcgacgctcaagtcagaggtggcgaaacccgacaggactataaagataccaggcgtttccccctggaagctccctcgtgcgctctcctgttccgaccctgccgcttaccggatacctgtccgcctttctctcttcgggaagcgtggcgctttctcatagctcacgctgtaggtatctcagttcggtgtaggtcgttcgctccaagctgggctgtgtgcacgaaccccccgttcagcccgaccgctgcgccttatccggtaactatcgtcttgagtccaacccggtaagacacgacttatcgccactggcagcagccactggtaacaggattagcagagcgaggtatgtaggcggtgctacagagttcttgaagtggtggcctaactacggctacactagaagaacagtatttggtatctgcgctctgctgaagccagttaccttcggaaaaagagttggtagctcttgatccggcaaacaaaccaccgctggtagcggtggtttttttgtttgcaagcagcagattacgcgcagaaaaaaaggatctcaagaagatcctttgatcttttctacggggtctgacgctcagtggaacgaaaactcacgttaagggattttggtcatgagattatcaaaaaggatcttcacctagatccttttaaattaaaaatgaagttttaaatcaatctaaagtatatatgagtaaacttggtctgacagttaccaatgcttaatcagtgaggcacctatctcagcgatctgtctatttcgttcatccatagttgcctgactccccgtcgtgtagataactacgatacgggagggcttaccatctggccccagtgctgcaatgataccgcgagacccacgctcaccggctccagatttatcagcaataaaccagccagccggaagggccgagcgcagaagtggtcctgcaactttatccgcctccatccagtctattaattgttgccgggaagctagagtaagtagttcgccagttaatagtttgcgcaacgttgttgccattgctacaggcatcgtggtgtcacgctcgtcgtttggtatggcttcattcagctccggttcccaacgatcaaggcgagttacatgatcccccatgttgtgcaaaaaagcggttagctccttcggtcctccgatcgttgtcagaagtaagttggccgcagtgttatcactcatggttatggcagcactgcataattctcttactgtcatgccatccgtaagatgcttttctgtgactggtgagtactcaaccaagtcattctgagaatagtgtatgcggcgaccgagttgctcttgcccggcgtcaatacgggataataccgcgccacatagcagaactttaaaagtgctcatcattggaaaacgttcttcggggcgaaaactctcaaggatcttaccgctgttgagatccagttcgatgtaacccactcgtgcacccaactgatcttcagcatcttttactttcaccagcgtttctgggtgagcaaaaacaggaaggcaaaatgccgcaaaaaagggaataagggcgacacggaaatgttgaatactcatactcttcctttttcaatattattgaagcatttatcagggttattgtctcatgagcggatacatatttgaatgtatttagaaaaataaacaaataggggttccgcgcacatttccccgaaaagtgccacctgacgtctaagaaaccattattatcatgacattaacctataaaaataggcgtatcacgaggccctttcgtcggcgcgccgcggccgc

SEQ ID NO: 738 - DNA, 26 bp, synthetic construct
  source 1..26: mol_type = other DNA
tgcacacctcctggcgggcagctctg

SEQ ID NO: 739 - DNA, 17 bp, synthetic construct
  source 1..17: mol_type = other DNA
tgttctggcaatacctg

SEQ ID NO: 740 - DNA, 24 bp, synthetic construct
  source 1..24: mol_type = other DNA
gggaggcctgccctgactgcccac

SEQ ID NO: 741 - RNA, 21 nt, synthetic construct
  source 1..21: mol_type = other RNA
cagcagcagtagaagcagcag

SEQ ID NO: 742 - skipped

SEQ ID NO: 743 - RNA, 21 nt, synthetic construct
  source 1..21: mol_type = other RNA
ctgctgctgctgctgctgctg

SEQ ID NO: 744 - RNA, 22 nt, synthetic construct
  source 1..22: mol_type = other RNA
gctgctgctgctgctgctgctg

SEQ ID NO: 745 - RNA, 23 nt, synthetic construct
  source 1..23: mol_type = other RNA
tgctgctgctgctgctgctgctg

SEQ ID NO: 746 - DNA, 21 bp, synthetic construct
  source 1..21: mol_type = other DNA
cagcagcagcagcagcagcag

SEQ ID NO: 747 - DNA, 20 bp, synthetic construct
  source 1..20: mol_type = other DNA
agcagcagcagcagcagcag

SEQ ID NO: 748 - DNA, 21 bp, synthetic construct
  source 1..21: mol_type = other DNA
ctgctgctgctgctgctgctg

SEQ ID NO: 749 - DNA, 21 bp, synthetic construct
  source 1..21: mol_type = other DNA
ctgctgctgctgctgctgttt

SEQ ID NO: 750 - DNA, 19 bp, synthetic construct
  source 1..19: mol_type = other DNA
gcagcagcagtttcagcag

SEQ ID NO: 751 - DNA, 23 bp, synthetic construct
  source 1..23: mol_type = other DNA
ctgctgaaactgctgctgttttt

SEQ ID NO: 752 - DNA, 23 bp, synthetic construct
  source 1..23: mol_type = other DNA
gcagcagcagcagcagcagcagc

SEQ ID NO: 753 - DNA, 22 bp, synthetic construct
  source 1..22: mol_type = other DNA
cagcagcagcagcagcagcagc

SEQ ID NO: 754 - DNA, 23 bp, synthetic construct
  source 1..23: mol_type = other DNA
gctgctgctgctgctgctgctgc

SEQ ID NO: 755 - DNA, 20 bp, synthetic construct
  source 1..20: mol_type = other DNA
ctgctgctgctgctgctgct

SEQ ID NO: 756 - DNA, 23 bp, synthetic construct
  source 1..23: mol_type = other DNA
gcagcagctctagcagcagcagc

SEQ ID NO: 757 - DNA, 20 bp, synthetic construct
  source 1..20: mol_type = other DNA
cgcagcagctctagcagcag

SEQ ID NO: 758 - DNA, 23 bp, synthetic construct
  source 1..23: mol_type = other DNA
gctgctgctgctagagctgctgc

SEQ ID NO: 759 - DNA, 22 bp, synthetic construct
  source 1..22: mol_type = other DNA
ctgctgctagagctgctgcttt

SEQ ID NO: 760 - RNA, 57 nt, synthetic construct
  source 1..57: mol_type = other RNA
ccggnnnnnnnnnnnnnnnnnnnnnctcgagnnnnnnnnnnnnnnnnnnnnnttttt

SEQ ID NO: 761 - RNA, 59 nt, synthetic construct
  source 1..59: mol_type = other RNA
ccnnnnnnnnnnnnnnnnnnnnnnnacctgcnnnnnnnnnnnnnnnnnnnnnnnttttt

SEQ ID NO: 762 - RNA, 59 nt, synthetic construct
  source 1..59: mol_type = other RNA
ccgcagcagctctagcagcagcagcacctgcgctgctgctgctagagctgctgcttttt

SEQ ID NO: 763 - RNA, 111 nt, synthetic construct
  source 1..111: mol_type = other RNA
tgcacacctcctggcgggcagctgtggtgcattgtagttgcattgcatgttctggcaatacctgtgcaatgtttccacagtgcatcacggaggcctgccctgactgcccac

SEQ ID NO: 764 - RNA, 111 nt, synthetic construct
  source 1..111: mol_type = other RNA
tgcacacctcctggcgggcagctnnnnnnnnnnnnnnnnnnnnnnnntgttctggcaatacctgnnnnnnnnnnnnnnnnnnnnnnnnggaggcctgccctgactgcccac

SEQ ID NO: 765 - RNA, 111 nt, synthetic construct
  source 1..111: mol_type = other RNA
tgcacacctcctggcgggcagctctgctgctgctaaagctgctgctgtgttctggcaatacctgcagcagcacatctagcagcagcagggaggcctgccctgactgcccac

SEQ ID NO: 766 - RNA, 21 nt, synthetic construct
  source 1..21: mol_type = other RNA
cagcagctgcggcagcagcag

SEQ ID NO: 767 - RNA, 21 nt, synthetic construct
  source 1..21: mol_type = other RNA
cagcaggagcggcagcagcag

SEQ ID NO: 768 - RNA, 21 nt, synthetic construct
  source 1..21: mol_type = other RNA
cagcagaagcggcagcagcag

SEQ ID NO: 769 - RNA, 21 nt, synthetic construct
  source 1..21: mol_type = other RNA
cagcatcagcggcagcagcag

SEQ ID NO: 770 - RNA, 21 nt, synthetic construct
  source 1..21: mol_type = other RNA
cagcaacagcggcagcagcag

SEQ ID NO: 771 - RNA, 21 nt, synthetic construct
  source 1..21: mol_type = other RNA
cagcagcagtcgcagcagcag

SEQ ID NO: 772 - RNA, 21 nt, synthetic construct
  source 1..21: mol_type = other RNA
cagcagcatccgcagcagcag

SEQ ID NO: 773 - RNA, 21 nt, synthetic construct
  source 1..21: mol_type = other RNA
cagcagcacccgcagcagcag

SEQ ID NO: 774 - RNA, 21 nt, synthetic construct
  source 1..21: mol_type = other RNA
cagcaggagccgcagcagcag

SEQ ID NO: 775 - RNA, 21 nt, synthetic construct
  source 1..21: mol_type = other RNA
cagcatcagccgcagcagcag

SEQ ID NO: 776 - RNA, 21 nt, synthetic construct
  source 1..21: mol_type = other RNA
cagcaccagccgcagcagcag

SEQ ID NO: 777 - RNA, 21 nt, synthetic construct
  source 1..21: mol_type = other RNA
cagcagccgcagctgcagcag

SEQ ID NO: 778 - RNA, 21 nt, synthetic construct
  source 1..21: mol_type = other RNA
cagcagcagcaccggcagcag

SEQ ID NO: 779 - RNA, 21 nt, synthetic construct
  source 1..21: mol_type = other RNA
cagcagcagaagcggcagcag

SEQ ID NO: 780 - RNA, 21 nt, synthetic construct
  source 1..21: mol_type = other RNA
cagcagcatcagcggcagcag

SEQ ID NO: 781 - RNA, 21 nt, synthetic construct
  source 1..21: mol_type = other RNA
cagcagcaccagcggcagcag

SEQ ID NO: 782 - RNA, 21 nt, synthetic construct
  source 1..21: mol_type = other RNA
cagcagcaacagcggcagcag

SEQ ID NO: 783 - RNA, 21 nt, synthetic construct
  source 1..21: mol_type = other RNA
cagcagccgcagcggcagcag

SEQ ID NO: 784 - RNA, 21 nt, synthetic construct
  source 1..21: mol_type = other RNA
cagcatcagcagcggcagcag

SEQ ID NO: 785 - RNA, 21 nt, synthetic construct
  source 1..21: mol_type = other RNA
cagcaccagcagcggcagcag

SEQ ID NO: 786 - RNA, 21 nt, synthetic construct
  source 1..21: mol_type = other RNA
cagcagcagcatccgcagcag

SEQ ID NO: 787 - RNA, 21 nt, synthetic construct
  source 1..21: mol_type = other RNA
cagcagcaggagccgcagcag

SEQ ID NO: 788 - RNA, 21 nt, synthetic construct
  source 1..21: mol_type = other RNA
cagcagcatcagccgcagcag

SEQ ID NO: 789 - RNA, 21 nt, synthetic construct
  source 1..21: mol_type = other RNA
cagcagcaccagccgcagcag

SEQ ID NO: 790 - RNA, 21 nt, synthetic construct
  source 1..21: mol_type = other RNA
cagcagaagcagccgcagcag

SEQ ID NO: 791 - RNA, 21 nt, synthetic construct
  source 1..21: mol_type = other RNA
cagcatcagcagccgcagcag

SEQ ID NO: 792 - RNA, 21 nt, synthetic construct
  source 1..21: mol_type = other RNA
cagcaccagcagccgcagcag

SEQ ID NO: 793 - RNA, 21 nt, synthetic construct
  source 1..21: mol_type = other RNA
ctgctgctgccgcagctgctg

SEQ ID NO: 794 - RNA, 21 nt, synthetic construct
  source 1..21: mol_type = other RNA
ctgctgctgccgctcctgctg

SEQ ID NO: 795 - RNA, 21 nt, synthetic construct
  source 1..21: mol_type = other RNA
ctgctgctgccgcttctgctg

SEQ ID NO: 796 - RNA, 21 nt, synthetic construct
  source 1..21: mol_type = other RNA
ctgctgctgccgctgatgctg

SEQ ID NO: 797 - RNA, 21 nt, synthetic construct
  source 1..21: mol_type = other RNA
ctgctgctgccgctgttgctg

SEQ ID NO: 798 - RNA, 21 nt, synthetic construct
  source 1..21: mol_type = other RNA
ctgctgctgcgactgctgctg

SEQ ID NO: 799 - RNA, 21 nt, synthetic construct
  source 1..21: mol_type = other RNA
ctgctgctgcggatgctgctg

SEQ ID NO: 800 - RNA, 21 nt, synthetic construct
  source 1..21: mol_type = other RNA
ctgctgctgcgggtgctgctg

SEQ ID NO: 801 - RNA, 21 nt, synthetic construct
  source 1..21: mol_type = other RNA
ctgctgctgcggctcctgctg

SEQ ID NO: 802 - RNA, 21 nt, synthetic construct
  source 1..21: mol_type = other RNA
ctgctgctgcggctgatgctg

SEQ ID NO: 803 - RNA, 21 nt, synthetic construct
  source 1..21: mol_type = other RNA
ctgctgctgcggctggtgctg

SEQ ID NO: 804 - RNA, 21 nt, synthetic construct
  source 1..21: mol_type = other RNA
ctgctgcagctgcggctgctg

SEQ ID NO: 805 - RNA, 21 nt, synthetic construct
  source 1..21: mol_type = other RNA
ctgctgccggtgctgctgctg

SEQ ID NO: 806 - RNA, 21 nt, synthetic construct
  source 1..21: mol_type = other RNA
ctgctgccgcttctgctgctg

SEQ ID NO: 807 - RNA, 21 nt, synthetic construct
  source 1..21: mol_type = other RNA
ctgctgccgctgatgctgctg

SEQ ID NO: 808 - RNA, 21 nt, synthetic construct
  source 1..21: mol_type = other RNA
ctgctgccgctggtgctgctg

SEQ ID NO: 809 - RNA, 21 nt, synthetic construct
  source 1..21: mol_type = other RNA
ctgctgccgctgttgctgctg

SEQ ID NO: 810 - RNA, 21 nt, synthetic construct
  source 1..21: mol_type = other RNA
ctgctgccgctgcggctgctg

SEQ ID NO: 811 - RNA, 21 nt, synthetic construct
  source 1..21: mol_type = other RNA
ctgctgccgctgctgatgctg

SEQ ID NO: 812 - RNA, 21 nt, synthetic construct
  source 1..21: mol_type = other RNA
ctgctgccgctgctggtgctg

SEQ ID NO: 813 - RNA, 21 nt, synthetic construct
  source 1..21: mol_type = other RNA
ctgctgcggatgctgctgctg

SEQ ID NO: 814 - RNA, 21 nt, synthetic construct
  source 1..21: mol_type = other RNA
ctgctgcggctcctgctgctg

SEQ ID NO: 815 - RNA, 21 nt, synthetic construct
  source 1..21: mol_type = other RNA
ctgctgcggctgatgctgctg

SEQ ID NO: 816 - RNA, 21 nt, synthetic construct
  source 1..21: mol_type = other RNA
ctgctgcggctggtgctgctg

SEQ ID NO: 817 - RNA, 21 nt, synthetic construct
  source 1..21: mol_type = other RNA
ctgctgcggctgcttctgctg

SEQ ID NO: 818 - RNA, 21 nt, synthetic construct
  source 1..21: mol_type = other RNA
ctgctgcggctgctgatgctg

SEQ ID NO: 819 - RNA, 21 nt, synthetic construct
  source 1..21: mol_type = other RNA
ctgctgcggctgctggtgctg

SEQ ID NO: 820 - RNA, 13498 nt, Homo sapiens
  source 1..13498: mol_type = transcribed RNA
gctgccgggacgggtccaagatggacggccgctcaggttctgcttttacctgcggcccagagccccattcattgccccggtgctgagcggcgccgcgagtcggcccgaggcctccggggactgccgtgccgggcgggagaccgccatggcgaccctggaaaagctgatgaaggccttcgagtccctcaagtccttccagcagcagcagcagcagcagcagcagcagcagcagcagcagcagcagcagcagcagcagcagcaacagccgccaccgccgccgccgccgccgccgcctcctcagcttcctcagccgccgccgcaggcacagccgctgctgcctcagccgcagccgcccccgccgccgcccccgccgccacccggcccggctgtggctgaggagccgctgcaccgaccaaagaaagaactttcagctaccaagaaagaccgtgtgaatcattgtctgacaatatgtgaaaacatagtggcacagtctgtcagaaattctccagaatttcagaaacttctgggcatcgctatggaactttttctgctgtgcagtgatgacgcagagtcagatgtcaggatggtggctgacgaatgcctcaacaaagttatcaaagctttgatggattctaatcttccaaggttacagctcgagctctataaggaaattaaaaagaatggtgcccctcggagtttgcgtgctgccctgtggaggtttgctgagctggctcacctggttcggcctcagaaatgcaggccttacctggtgaaccttctgccgtgcctgactcgaacaagcaagagacccgaagaatcagtccaggagaccttggctgcagctgttcccaaaattatggcttcttttggcaattttgcaaatgacaatgaaattaaggttttgttaaaggccttcatagcgaacctgaagtcaagctcccccaccattcggcggacagcggctggatcagcagtgagcatctgccagcactcaagaaggacacaatatttctatagttggctactaaatgtgctcttaggcttactcgttcctgtcgaggatgaacactccactctgctgattcttggcgtgctgctcaccctgaggtatttggtgcccttgctgcagcagcaggtcaaggacacaagcctgaaaggcagcttcggagtgacaaggaaagaaatggaagtctctccttctgcagagcagcttgtccaggtttatgaactgacgttacatcatacacagcaccaagaccacaatgttgtgaccggagccctggagctgttgcagcagctcttcagaacgcctccacccgagcttctgcaaaccctgaccgcagtcgggggcattgggcagctcaccgctgctaaggaggagtctggtggccgaagccgtagtgggagtattgtggaacttatagctggagggggttcctcatgcagccctgtcctttcaagaaaacaaaaaggcaaagtgctcttaggagaagaagaagccttggaggatgactctgaatcgagatcggatgtcagcagctctgccttaacagcctcagtgaaggatgagatcagtggagagctggctgcttcttcaggggtttccactccagggtcagcaggtcatgacatcatcacagaacagccacggtcacagcacacactgcaggcggactcagtggatctggccagctgtgacttgacaagctctgccactgatggggatgaggaggatatcttgagccacagctccagccaggtcagcgccgtcccatctgaccctgccatggacctgaatgatgggacccaggcctcgtcgcccatcagcgacagctcccagaccaccaccgaagggcctgattcagctgttaccccttcagacagttctgaaattgtgttagacggtaccgacaaccagtatttgggcctgcagattggacagccccaggatgaagatgaggaagccacaggtattcttcctgatgaagcctcggaggccttcaggaactcttccatggcccttcaacaggcacatttattgaaaaacatgagtcactgcaggcagccttctgacagcagtgttgataaatttgtgttgagagatgaagctactgaaccgggtgatcaagaaaacaagccttgccgcatcaaaggtgacattggacagtccactgatgatgactctgcacctcttgtccattgtgtccgccttttatctgcttcgtttttgctaacagggggaaaaaatgtgctggttccggacagggatgtgagggtcagcgtgaaggccctggccctcagctgtgtgggagcagctgtggccctccacccggaatctttcttcagcaaactctataaagttcctcttgacaccacggaataccctgaggaacagtatgtctcagacatcttgaactacatcgatcatggagacccacaggttcgaggagccactgccattctctgtgggaccctcatctgctccatcctcagcaggtcccgcttccacgtgggagattggatgggcaccattagaaccctcacaggaaatacattttctttggcggattgcattcctttgctgcggaaaacactgaaggatgagtcttctgttacttgcaagttagcttgtacagctgtgaggaactgtgtcatgagtctctgcagcagcagctacagtgagttaggactgcagctgatcatcgatgtgctgactctgaggaacagttcctattggctggtgaggacagagcttctggaaacccttgcagagattgacttcaggctggtgagctttttggaggcaaaagcagaaaacttacacagaggggctcatcattatacagggcttttaaaactgcaagaacgagtgctcaataatgttgtcatccatttgcttggagatgaagaccccagggtgcgacatgttgccgcagcatcactaattaggcttgtcccaaagctgttttataaatgtgaccaaggacaagctgatccagtagtggccgtggcaagagatcaaagcagtgtttacctgaaacttctcatgcatgagacgcagcctccatctcatttctccgtcagcacaataaccagaatatatagaggctataacctactaccaagcataacagacgtcactatggaaaataacctttcaagagttattgcagcagtttctcatgaactaatcacatcaaccaccagagcactcacatttggatgctgtgaagctttgtgtcttctttccactgccttcccagtttgcatttggagtttaggttggcactgtggagtgcctccactgagtgcctcagatgagtctaggaagagctgtaccgttgggatggccacaatgattctgaccctgctctcgtcagcttggttcccattggatctctcagcccatcaagatgctttgattttggccggaaacttgcttgcagccagtgctcccaaatctctgagaagttcatgggcctctgaagaagaagccaacccagcagccaccaagcaagaggaggtctggccagccctgggggaccgggccctggtgcccatggtggagcagctcttctctcacctgctgaaggtgattaacatttgtgcccacgtcctggatgacgtggctcctggacccgcaataaaggcagccttgccttctctaacaaaccccccttctctaagtcccatccgacgaaaggggaaggagaaagaaccaggagaacaagcatctgtaccgttgagtcccaagaaaggcagtgaggccagtgcagcttctagacaatctgatacctcaggtcctgttacaacaagtaaatcctcatcactggggagtttctatcatcttccttcatacctcaaactgcatgatgtcctgaaagctacacacgctaactacaaggtcacgctggatcttcagaacagcacggaaaagtttggagggtttctccgctcagccttggatgttctttctcagatactagagctggccacactgcaggacattgggaagtgtgttgaagagatcctaggatacctgaaatcctgctttagtcgagaaccaatgatggcaactgtttgtgttcaacaattgttgaagactctctttggcacaaacttggcctcccagtttgatggcttatcttccaaccccagcaagtcacaaggccgagcacagcgccttggctcctccagtgtgaggccaggcttgtaccactactgcttcatggccccgtacacccacttcacccaggccctcgctgacgccagcctgaggaacatggtgcaggcggagcaggagaacgacacctcgggatggtttgatgtcctccagaaagtgtctacccagttgaagacaaacctcacgagtgtcacaaagaaccgtgcagataagaatgctattcataatcacattcgtttgtttgaacctcttgttataaaagctttaaaacagtacacgactacaacatgtgtgcagttacagaagcaggttttagatttgctggcgcagctggttcagttacgggttaattactgtcttctggattcagatcaggtgtttattggctttgtattgaaacagtttgaatacattgaagtgggccagttcagggaatcagaggcaatcattccaaacatctttttcttcttggtattactatcttatgaacgctatcattcaaaacagatcattggaattcctaaaatcattcagctctgtgatggcatcatggccagtggaaggaaggctgtgacacatgccataccggctctgcagcccatagtccacgacctctttgtattaagaggaacaaataaagctgatgcaggaaaagagcttgaaacccaaaaagaggtggtggtgtcaatgttactgagactcatccagtaccatcaggtgttggagatgttcattcttgtcctgcagcagtgccacaaggagaatgaagacaagtggaagcgactgtctcgacagatagctgacatcatcctcccaatgttagccaaacagcagatgcacattgactctcatgaagcccttggagtgttaaatacattatttgagattttggccccttcctccctccgtccggtagacatgcttttacggagtatgttcgtcactccaaacacaatggcgtccgtgagcactgttcaactgtggatatcgggaattctggccattttgagggttctgatttcccagtcaactgaagatattgttctttctcgtattcaggagctctccttctctccgtatttaatctcctgtacagtaattaataggttaagagatggggacagtacttcaacgctagaagaacacagtgaagggaaacaaataaagaatttgccagaagaaacattttcaaggtttctattacaactggttggtattcttttagaagacattgttacaaaacagctgaaggtggaaatgagtgagcagcaacatactttctattgccaggaactaggcacactgctaatgtgtctgatccacatcttcaagtctggaatgttccggagaatcacagcagctgccactaggctgttccgcagtgatggctgtggcggcagtttctacaccctggacagcttgaacttgcgggctcgttccatgatcaccacccacccggccctggtgctgctctggtgtcagatactgctgcttgtcaaccacaccgactaccgctggtgggcagaagtgcagcagaccccgaaaagacacagtctgtccagcacaaagttacttagtccccagatgtctggagaagaggaggattctgacttggcagccaaacttggaatgtgcaatagagaaatagtacgaagaggggctctcattctcttctgtgattatgtctgtcagaacctccatgactccgagcacttaacgtggctcattgtaaatcacattcaagatctgatcagcctttcccacgagcctccagtacaggacttcatcagtgccgttcatcggaactctgctgccagcggcctgttcatccaggcaattcagtctcgttgtgaaaacctttcaactccaaccatgctgaagaaaactcttcagtgcttggaggggatccatctcagccagtcgggagctgtgctcacgctgtatgtggacaggcttctgtgcacccctttccgtgtgctggctcgcatggtcgacatccttgcttgtcgccgggtagaaatgcttctggctgcaaatttacagagcagcatggcccagttgccaatggaagaactcaacagaatccaggaataccttcagagcagcgggctcgctcagagacaccaaaggctctattccctgctggacaggtttcgtctctccaccatgcaagactcacttagtccctctcctccagtctcttcccacccgctggacggggatgggcacgtgtcactggaaacagtgagtccggacaaagactggtacgttcatcttgtcaaatcccagtgttggaccaggtcagattctgcactgctggaaggtgcagagctggtgaatcggattcctgctgaagatatgaatgccttcatgatgaactcggagttcaacctaagcctgctagctccatgcttaagcctagggatgagtgaaatttctggtggccagaagagtgccctttttgaagcagcccgtgaggtgactctggcccgtgtgagcggcaccgtgcagcagctccctgctgtccatcatgtcttccagcccgagctgcctgcagagccggcggcctactggagcaagttgaatgatctgtttggggatgctgcactgtatcagtccctgcccactctggcccgggccctggcacagtacctggtggtggtctccaaactgcccagtcatttgcaccttcctcctgagaaagagaaggacattgtgaaattcgtggtggcaacccttgaggccctgtcctggcatttgatccatgagcagatcccgctgagtctggatctccaggcagggctggactgctgctgcctggccctgcagctgcctggcctctggagcgtggtctcctccacagagtttgtgacccacgcctgctccctcatctactgtgtgcacttcatcctggaggccgttgcagtgcagcctggagagcagcttcttagtccagaaagaaggacaaataccccaaaagccatcagcgaggaggaggaggaagtagatccaaacacacagaatcctaagtatatcactgcagcctgtgagatggtggcagaaatggtggagtctctgcagtcggtgttggccttgggtcataaaaggaatagcggcgtgccggcgtttctcacgccattgctaaggaacatcatcatcagcctggcccgcctgccccttgtcaacagctacacacgtgtgcccccactggtgtggaagcttggatggtcacccaaaccgggaggggattttggcacagcattccctgagatccccgtggagttcctccaggaaaaggaagtctttaaggagttcatctaccgcatcaacacactaggctggaccagtcgtactcagtttgaagaaacttgggccaccctccttggtgtcctggtgacgcagcccctcgtgatggagcaggaggagagcccaccagaagaagacacagagaggacccagatcaacgtcctggccgtgcaggccatcacctcactggtgctcagtgcaatgactgtgcctgtggccggcaacccagctgtaagctgcttggagcagcagccccggaacaagcctctgaaagctctcgacaccaggtttgggaggaagctgagcattatcagagggattgtggagcaagagattcaagcaatggtttcaaagagagagaatattgccacccatcatttatatcaggcatgggatcctgtcccttctctgtctccggctactacaggtgccctcatcagccacgagaagctgctgctacagatcaaccccgagcgggagctggggagcatgagctacaaactcggccaggtgtccatacactccgtgtggctggggaacagcatcacacccctgagggaggaggaatgggacgaggaagaggaggaggaggccgacgcccctgcaccttcgtcaccacccacgtctccagtcaactccaggaaacaccgggctggagttgacatccactcctgttcgcagtttttgcttgagttgtacagccgctggatcctgccgtccagctcagccaggaggaccccggccatcctgatcagtgaggtggtcagatcccttctagtggtctcagacttgttcaccgagcgcaaccagtttgagctgatgtatgtgacgctgacagaactgcgaagggtgcacccttcagaagacgagatcctcgctcagtacctggtgcctgccacctgcaaggcagctgccgtccttgggatggacaaggccgtggcggagcctgtcagccgcctgctggagagcacgctcaggagcagccacctgcccagcagggttggagccctgcacggcgtcctctatgtgctggagtgcgacctgctggacgacactgccaagcagctcatcccggtcatcagcgactatctcctctccaacctgaaagggatcgcccactgcgtgaacattcacagccagcagcacgtactggtcatgtgtgccactgcgttttacctcattgagaactatcctctggacgtagggccggaattttcagcatcaataatacagatgtgtggggtgatgctgtctggaagtgaggagtccaccccctccatcatttaccactgtgccctcagaggcctggagcgcctcctgctctctgagcagctctcccgcctggatgcagaatcgctggtcaagctgagtgtggacagagtgaacgtgcacagcccgcaccgggccatggcggctctgggcctgatgctcacctgcatgtacacaggaaaggagaaagtcagtccgggtagaacttcagaccctaatcctgcagcccccgacagcgagtcagtgattgttgctatggagcgggtatctgttctttttgataggatcaggaaaggctttccttgtgaagccagagtggtggccaggatcctgccccagtttctagacgacttcttcccaccccaggacatcatgaacaaagtcatcggagagtttctgtccaaccagcagccatacccccagttcatggccaccgtggtgtataaggtgtttcagactctgcacagcaccgggcagtcgtccatggtccgggactgggtcatgctgtccctctccaacttcacgcagagggccccggtcgccatggccacgtggagcctctcctgcttctttgtcagcgcgtccaccagcccgtgggtcgcggcgatcctcccacatgtcatcagcaggatgggcaagctggagcaggtggacgtgaaccttttctgcctggtcgccacagacttctacagacaccagatagaggaggagctcgaccgcagggccttccagtctgtgcttgaggtggttgcagccccaggaagcccatatcaccggctgctgacttgtttacgaaatgtccacaaggtcaccacctgctgagcgccatggtgggagagactgtgaggcggcagctggggccggagcctttggaagtctgcgcccttgtgccctgcctccaccgagccagcttggtccctatgggcttccgcacatgccgcgggcggccaggcaacgtgcgtgtctctgccatgtggcagaagtgctctttgtggcagtggccaggcagggagtgtctgcagtcctggtggggctgagcctgaggccttccagaaagcaggagcagctgtgctgcaccccatgtgggtgaccaggtcctttctcctgatagtcacctgctggttgttgccaggttgcagctgctcttgcatctgggccagaagtcctccctcctgcaggctggctgttggcccctctgctgtcctgcagtagaaggtgccgtgagcaggctttgggaacactggcctgggtctccctggtggggtgtgcatgccacgccccgtgtctggatgcacagatgccatggcctgtgctgggccagtggctgggggtgctagacacccggcaccattctcccttctctcttttcttctcaggatttaaaatttaattatatcagtaaagagattaattttaacgtaactctttctatgcccgtgtaaagtatgtgaatcgcaaggcctgtgctgcatgcgacagcgtccggggtggtggacagggcccccggccacgctccctctcctgtagccactggcatagccctcctgagcacccgctgacatttccgttgtacatgttcctgtttatgcattcacaaggtgactgggatgtagagaggcgttagtgggcaggtggccacagcaggactgaggacaggcccccattatcctaggggtgcgctcacctgcagcccctcctcctcgggcacagacgactgtcgttctccacccaccagtcagggacagcagcctccctgtcactcagctgagaaggccagccctccctggctgtgagcagcctccactgtgtccagagacatgggcctcccactcctgttccttgctagccctggggtggcgtctgcctaggagctggctggcaggtgttgggacctgctgctccatggatgcatgccctaagagtgtcactgagctgtgttttgtctgagcctctctcggtcaacagcaaagcttggtgtcttggcactgttagtgacagagcccagcatcccttctgcccccgttccagctgacatcttgcacggtgaccccttttagtcaggagagtgcagatctgtgctcatcggagactgccccacggccctgtcagagccgccactcctatccccaggccaggtccctggaccagcctcctgtttgcaggcccagaggagccaagtcattaaaatggaagtggattctggatggccgggctgctgctgatgtaggagctggatttgggagctctgcttgccgactggctgtgagacgaggcaggggctctgcttcctcagccctagaggcgagccaggcaaggttggcgactgtcatgtggcttggtttggtcatgcccgtcgatgttttgggtattgaatgtggtaagtggaggaaatgttggaactctgtgcaggtgctgccttgagacccccaagcttccacctgtccctctcctatgtggcagctggggagcagctgagatgtggacttgtatgctgcccacatacgtgagggggagctgaaagggagcccctcctctgagcagcctctgccaggcctgtatgaggcttttcccaccagctcccaacagaggcctcccccagccaggaccacctcgtcctcgtggcggggcagcaggagcggtagaaaggggtccgatgtttgaggaggcccttaagggaagctactgaattataacacgtaagaaaatcaccattccgtattggttgggggctcctgtttctcatcctagctttttcctggaaagcccgctagaaggtttgggaacgaggggaaagttctcagaactgttggctgctccccacccgcctcccgcctcccccgcaggttatgtcagcagctctgagacagcagtatcacaggccagatgttgttcctggctagatgtttacatttgtaagaaataacactgtgaatgtaaaacagagccattcccttggaatgcatatcgctgggctcaacatagagtttgtcttcctcttgtttacgacgtgatctaaaccagtccttagcaaggggctcagaacaccccgctctggcagtaggtgtcccccacccccaaagacctgcctgtgtgctccggagatgaatatgagctcattagtaaaaatgacttcacccacgcatatacataaagtatccatgcatgtgcatatagacacatctataattttacacacacacctctcaagacggagatgcatggcctctaagagtgcccgtgtcggttcttcctggaagttgactttccttagacccgccaggtcaagttagccgcgtgacggacatccaggcgtgggacgtggtcagggcagggctcattcattgcccactaggatcccactggcgaagatggtctccatatcagctctctgcagaagggaggaagactttatcatgttcctaaaaatctgtggcaagcacccatcgtattatccaaattttgttgcaaatgtgattaatttggttgtcaagttttgggggtgggctgtggggagattgcttttgttttcctgctggtaatatcgggaaagattttaatgaaaccagggtagaattgtttggcaatgcactgaagcgtgtttctttcccaaaatgtgcctcccttccgctgcgggcccagctgagtctatgtaggtgatgtttccagctgccaagtgctctttgttactgtccaccctcatttctgccagcgcatgtgtcctttcaaggggaaaatgtgaagctgaaccccctccagacacccagaatgtagcatctgagaaggccctgtgccctaaaggacacccctcgcccccatcttcatggagggggtcatttcagagccctcggagccaatgaacagctcctcctcttggagctgagatgagccccacgtggagctcgggacggatagtagacagcaataactcggtgtgtggccgcctggcaggtggaacttcctcccgttgcggggtggagtgaggttagttctgtgtgtctggtgggtggagtcaggcttctcttgctacctgtgagcatccttcccagcagacatcctcatcgggctttgtccctcccccgcttcctccctctgcggggaggacccgggaccacagctgctggccagggtagacttggagctgtcctccagaggggtcacgtgtaggagtgagaagaaggaagatcttgagagctgctgagggaccttggagagctcaggatggctcagacgaggacactcgcttgccgggcctgggcctcctgggaaggagggagctgctcagaatgccgcatgacaactgaaggcaacctggaaggttcaggggccgctcttcccccatgtgcctgtcacgctctggtgcagtcaaaggaacgccttcccctcagttgtttctaagagcagagtctcccgctgcaatctgggtggtaactgccagccttggaggatcgtggccaacgtggacctgcctacggagggtgggctctgacccaagtggggcctccttgtccaggtctcactgctttgcaccgtggtcagagggactgtcagctgagcttgagctcccctggagccagcagggctgtgatgggcgagtcccggagccccacccagacctgaatgcttctgagagcaaagggaaggactgacgagagatgtatatttaattttttaactgctgcaaacattgtacatccaaattaaaggaaaaaaatggaaaccatcaaaaaaaaaaaaaaaaaa

SEQ ID NO: 821 - RNA, 10557 nt, Homo sapiens
  source 1..10557: mol_type = transcribed RNA
atttctactacagtggcggagccgtacaggacctgtttcactgcagggggatccaaaacaagccccgtggagcagcagccagagcaacagcagccgcaagacattgtttctctccctctgcccccccttccccacgcaaccccagatccatttacactttacagagcatcgtgcatcaagtcaccagggtggtccattcaagctgcagatttgtttgtcatccttgtacagcaatctcctcctccactgccactacagggaagtgcatcacatgtcagcatactggagcatagtgaaagagtctattttgaagcttcaaacttagtgctgctgcagaccaggaacaagagagaaagagtggatttcagcctgcacggatggtcttgaaacacaaatggtttttggtctaggcgttttacactgagattctccactgccaccctttctactcaagcaaaatcttcgtgaaaagatctgctgcaaggaactgatagcttatggttctccattgtgatgaaagcacatggtacagttttccaaagaaattagaccattttcttcgtgagaaagaaatcgacgtgctgttttcatagggtatttctcacttctctgtgaaaggaagaaagaacacgcctgagcccaagagccctcaggagccctccagagcctgtgggaagtctccatggtgaagtataggctgaggctacctgtgaacagtacgcagtgaatgttcatccagagctgctgttggcggattgtacccacggggagatgattcctcatgaagagcctggatcccctacagaaatcaaatgtgactttccgtttatcagactaaaatcagagccatccagacagtgaaacagtcaccgtggaggggggacggcgaaaaatgaaatccaaccaagagcggagcaacgaatgcctgcctcccaagaagcgcgagatccccgccaccagccggtcctccgaggagaaggcccctaccctgcccagcgacaaccaccgggtggagggcacagcatggctcccgggcaaccctggtggccggggccacgggggcgggaggcatgggccggcagggacctcggtggagcttggtttacaacagggaataggtttacacaaagcattgtccacagggctggactactccccgcccagcgctcccaggtctgtccccgtggccaccacgctgcctgccgcgtacgccaccccgcagccagggaccccggtgtcccccgtgcagtacgctcacctgccgcacaccttccagttcattgggtcctcccaatacagtggaacctatgccagcttcatcccatcacagctgatccccccaaccgccaaccccgtcaccagtgcagtggcctcggccgcaggggccaccactccatcccagcgctcccagctggaggcctattccactctgctggccaacatgggcagtctgagccagacgccgggacacaaggctgagcagcagcagcagcagcagcagcagcagcagcagcagcatcagcatcagcagcagcagcagcagcagcagcagcagcagcagcagcagcacctcagcagggctccggggctcatcaccccggggtcccccccaccagcccagcagaaccagtacgtccacatttccagttctccgcagaacaccggccgcaccgcctctcctccggccatccccgtccacctccacccccaccagacgatgatcccacacacgctcaccctggggcccccctcccaggtcgtcatgcaatacgccgactccggcagccactttgtccctcgggaggccaccaagaaagctgagagcagccggctgcagcaggccatccaggccaaggaggtcctgaacggtgagatggagaagagccggcggtacggggccccgtcctcagccgacctgggcctgggcaaggcaggcggcaagtcggttcctcacccgtacgagtccaggcacgtggtggtccacccgagcccctcagactacagcagtcgtgatccttcgggggtccgggcctctgtgatggtcctgcccaacagcaacacgcccgcagctgacctggaggtgcaacaggccactcatcgtgaagcctccccttctaccctcaacgacaaaagtggcctgcatttagggaagcctggccaccggtcctacgcgctctcaccccacacggtcattcagaccacacacagtgcttcagagccactcccggtgggactgccagccacggccttctacgcagggactcaaccccctgtcatcggctacctgagcggccagcagcaagcaatcacctacgccggcagcctgccccagcacctggtgatccccggcacacagcccctgctcatcccggtcggcagcactgacatggaagcgtcgggggcagccccggccatagtcacgtcatccccccagtttgctgcagtgcctcacacgttcgtcaccaccgcccttcccaagagcgagaacttcaaccctgaggccctggtcacccaggccgcctacccagccatggtgcaggcccagatccacctgcctgtggtgcagtccgtggcctccccggcggcggctccccctacgctgcctccctacttcatgaaaggctccatcatccagttggccaacggggagctaaagaaggtggaagacttaaaaacagaagatttcatccagagtgcagagataagcaacgacctgaagatcgactccagcaccgtagagaggattgaagacagccatagcccgggcgtggccgtgatacagttcgccgtcggggagcaccgagcccaggtcagcgttgaagttttggtagagtatcctttttttgtgtttggacagggctggtcatcctgctgtccggagagaaccagccagctctttgatttgccgtgttccaaactctcagttggggatgtctgcatctcgcttaccctcaagaacctgaagaacggctctgttaaaaagggccagcccgtggatcccgccagcgtcctgctgaagcactcaaaggccgacggcctggcgggcagcagacacaggtatgccgagcaggaaaacggaatcaaccaggggagtgcccagatgctctctgagaatggcgaactgaagtttccagagaaaatgggattgcctgcagcgcccttcctcaccaaaatagaacccagcaagcccgcggcaacgaggaagaggaggtggtcggcgccagagagccgcaaactggagaagtcagaagacgaaccacctttgactcttcctaagccttctctaattcctcaggaggttaagatttgcattgaaggccggtctaatgtaggcaagtagaggcagcgtgggggaaaggaaacgtggctctcccttatcatttgtatccagattactgtactgtaggctaaaataacacagtatttacatgttatcttcttaattttaggtttctgttctaaccttgtcattagagttacagcaggtgtgtcgcaggagactggtgcatatgctttttccacgagtgtctgtcagtgagcgggcgggaggaagggcacagcaggagcggtcagggctccaggcatccccggggaagaaaggaacggggcttcacagtgcctgccttctctagcggcacagaagcagccgggggcgctgactcccgctagtgtcaggagaaaagtcccgtgggaagggtcctgcaggggtgcagggttgcacgcatgtgggggtgcacaggcgctgtggcggcgagtgagggtctctttttctctgcctccctctgcctcactctcttgctatcggcatgggccgggggggttcagagcagtgtcctcctggggttcccacgtgcaaaatcaacatcaggaacccagcttcagggcatcgcggagacgcgtcagatggcagatttggaaagttaaccatttaaaagaacatttttctctccaacatattttacaataaaagcaacttttaattgtatagatatatatttccccctatggggcctgactgcactgatatatattttttttaaagagcaactgccacatgcgggatttcatttctgctttttactagtgcagcgatgtcaccagggtgttgtggtggacagggaagcccctgctgtcatggccccacatggggtaaggggggttgggggtgggggagagggagagagcgaacacccacgctggtttctgtgcagtgttaggaaaaccaatcaggttattgcattgacttcactcccaagaggtagatgcaaactgcccttcagtgagagcaacagaagctcttcacgttgagtttgcgaaatctttttgtctttgaactctagtactgtttatagttcatgactatggacaactcgggtgccactttttttttttttcagattccagtgtgacatgaggaattagattttgaagatgagcatatattactatctttaagcatttaaaaatactgttcacactttattaccaagcatcttggtctctcattcaacaagtactgtatctcactttaaactctttggggaaaaaacaaaaacaaaaaaaactaagttgctttctttttttcaacactgtaactacatttcagctctgcagaattgctgaagagcaagatattgaaagtttcaatgtggtttaaagggatgaatgtgaattatgaactagtatgtgacaataaatgaccaccaagtactacctgacgggaggcacttttcactttgatgtctgagaatcagttcaaggcatatgcagagttggcagagaaactgagagaaaagggatggagaagagaatactcatttttgtccagtgtttttctttttaagatgaacttttaaagaaccttgcgatttgcacatattgagtttataacttgtgtgatattcctgcagtttttatccaataacattgtgggaaaggtttgggggactgaacgagcataaataaatgtagcaaaatttctttctaacctgcctaaactctaggccattttataaggttatgttcctttgaaaattcattttggtctttttaccacatctgtcacaaaaagccaggtcttagcgggctcttagaaactctgagaattttcttcagattcattgagagagttttccataaagacatttatatatgtgagcaagattttttttaaacaattactttattattgttgttattaatgttattttcagaatggcttttttttttctattcaaaatcaaatcgagatttaatgtttggtacaaacccagaaagggtatttcatagtttttaaacctttcattcccagagatccgaaatatcatttgtgggttttgaatgcatctttaaagtgctttaaaaaaaagttttataagtagggagaaatttttaaatattcttacttggatggctgcaactaaactgaacaaatacctgacttttcttttaccccattgaaaatagtactttcttcgtttcacaaattaaaaaaaaaatctggtatcaacccacattttggctgtctagtattcatttacatttagggttcaccaggactaatgatttttataaaccgttttctggggtgtaccaaaaacatttgaataggtttagaatagctagaatagttccttgactttcctcgaatttcattaccctctcagcatgcttgcagagagctgggtgggctcattcttgcagtcatactgcttatttagtgctgtattttttaaacgtttctgttcagagaacttgcttaatcttccatatattctgctcagggcacttgcaattattaggttttgtttttctttttgttttttagcctttgatggtaagaggaatacgggctgccacatagactttgttctcattaatatcactatttacaactcatgtggactcagaaaaacacacaccaccttttggcttacttcgagtattgaattgactggatccactaaaccaacactaagatgggaaaacacacatggtttggagcaataggaacatcatcataatttttgtggttctatttcaggtataggaattataaaataattggttctttctaaacacttgtcccatttcattctcttgcttttttagcatgtgcaatactttctgtgccaatagagtctgaccagtgtgctatatagttaaagctcattcccttttggctttttccttgtttggttgatcttccccattctggccagagcagggctggagggaaggagccaggagggagagagcctcccacctttcccctgctgcggatgctgagtgctggggcggggagccttcaggagccccgtgcgtctgccgccacgttgcagaaagagccagccaaggagacccgggggaggaaccgcagtgtcccctgtcaccacacggaatagtgaatgtggagtgtggagaggaaggaggcagattcatttctaagacgcactctggagccatgtagcctggagtcaacccattttccacggtcttttctgcaagtgggcaggcccctcctcggggtctgtgtccttgagacttggagccctgcctctgagcctggacgggaagtgtggcctgttgtgtgtgtgcgttctgagcgtgttggccagtggctgtggaggggaccacctgccacccacggtcaccactcccttgtggcagctttctcttcaaataggaagaacgcacagagggcaggagcctcctgtttgcagacgttggcgggccccgaggctcccagagcagcctctgtcaccgcttctgtgtagcaaacattaacgatgacaggggtagaaattcttcggtgccgttcagcttacaaggatcagccatgtgcctctgtactatgtccactttgcaatatttaccgacagccgtcttttgttctttctttcctgttttccatttttaaactagtaacagcaggccttttgcgtttacaatggaacacaatcaccaagaaattagtcagggcgaaaagaaaaaaataatactattaataagaaaccaacaaacaagaacctctctttctagggatttctaaatatataaaatgactgttccttagaatgtttaacttaagaattatttcagtttgtctgggccacactggggcagaggggggagggagggatacagagatggatgccacttacctcagatcttttaaagtggaaatccaaattgaattttcatttggactttcaggataattttctatgttggtcaacttttcgttttccctaactcacccagtttagtttgggatgatttgatttctgttgttgttgatcccatttctaacttggaattgtgagcctctatgttttctgttaggtgagtgtgttgggttttttccccccaccaggaagtggcagcatccctccttctcccctaaagggactctgcggaacctttcacacctctttctcagggacggggcaggtgtgtgtgtggtacactgacgtgtccagaagcagcactttgactgctctggagtagggttgtacaatttcaaggaatgtttggatttcctgcatcttgtggattactccttagataccgcatagattgcaatataatgctgcatgttcaagatgaacagtagctcctagtaatcataaaatccactctttgcacagtttgatctttactgaaatatgttgccaaaatttatttttgttgttgtagctctggattttgttttgttttgttttttaaggaaacgattgacaataccctttaacatctgtgactactaaggaaacctatttctttcatagagagaaaaatctccaatgcttttgaagacactaataccgtgctatttcagatatgggtgaggaagcagagctctcggtaccgaaggccgggcttcttgagctgtgttggttgtcatggctactgtttcatgaaccacaagcagctcaacagactggtctgttgccttctgaaaccctttgcacttcaatttgcaccaggtgaaaacagggccagcagactccatggcccaattcggtttcttcggtggtgatgtgaaaggagagaattacactttttttttttttaagtggcgtggaggcctttgcttccacatttgtttttaacccagaatttctgaaatagagaatttaagaacacatcaagtaataaatatacagagaatatacttttttataaagcacatgcatctgctattgtgttgggttggtttcctctcttttccacggacagtgttgtgtttctggcatagggaaactccaaacaacttgcacacctctactccggagctgagatttcttttacatagatgacctcgcttcaaatacgttaccttactgatgataggatcttttcttgtagcactataccttgtgggaatttttttttaaatgtacacctgatttgagaagctgaagaaaacaaaattttgaagcactcactttgaggagtacaggtaatgttttaaaaaattgcacaaaagaaaaatgaatgtcgaaatgattcattcagtgtttgaaagatatggctctgttgaaacaatgagtttcatactttgtttgtaaaaaaaaaaaagcagagaagggttgaaagttacatgtttttttgtatatagaaatttgtcatgtctaaatgatcagatttgtatggttatggcctggaagaattactacgtaaaaggctcttaaactatacctatgcttattgttatttttgttacatatagccctcgtctgagggaggggaactcggtattctgcgatttgagaatactgttcattcctatgctgaaagtacttctctgagctcccttcttagtctaaactcttaagccattgcaacttctttttcttcagagatgatgtttgacattttcagcacttcctgttcctataaacccaaagaatataatcttgaacacgaagtgtttgtaacaagggatccaggctaccaatcaaacaggactcattatggggacaaaaaaaaaaattatttcaccttctttccccccacacctcatttaaatggggggagtaaaaacatgatttcaatgtaaatgcctcattttattttagttttattttgatttttatttaatataaagaggccagaataaatacggagcatcttctcagaatagtattcctgtccaaaaatcaagccggacagtggaaactggacagctgtggggatattaagcacccccacttacaattcttaaattcagaatctcgtcccctcccttctcgttgaaggcaactgttctggtagctaactttctcctgtgtaatggcgggagggaacaccggcttcagtttttcatgtccccatgacttgcatacaaatggttcaactgtattaaaattaagtgcatttggccaataggtagtatctatacaataacaacaatctctaagaatttccataacttttcttatctgaaaggactcaagtcttccactgcagatacattggaggcttcacccacgttttctttccctttagtttgtttgctgtctggatggccaatgagcctgtctccttttctgtggccaatctgaaggccttcgttggaagtgttgtttacagtaatccttaccaagataacatactgtcctccagaataccaagtattaggtgacactagctcaagctgttgtcttcagagcagttaccaagaagctcggtgcacaggttttctctggttcttacaggaaccacctactctttcagttttctggcccaggagtggggtaaatcctttagttagtgcatttgaacttgatacctgtgcattcagttctgtgaatactgccctttttggcggggtttcctcatctccccagcctgaactgctcaactctaaacccaaattagtgtcagccgaaaggaggtttcaagatagtcctgtcagtatttgtggtgaccttcagattagacagtcttcatttccagccagtggagtcctggctccagagccatctctgagactcgtactactggatgttttaatatcagatcattacccaccatatgcctcccacaggccaagggaaaacagacaccagaacttgggttgagggcactaccagactgacatggccagtacagaggagaactagggaaggaatgatgttttgcaccttattgaaaagaaaattttaagtgcatacataatagttaagagcttttattgtgacaggagaacttttttccatatgcgtgcatactctctgtaattccagtgtaaaatattgtacttgcactagcttttttaaacaaatattaaaaaatggaagaattcatattctattttctaatcgtggtgtgtctatttgtaggatacactcgagtctgtttattgaattttatggtccctttctttgatggtgcttgcaggttttctaggtagaaattatttcattattataataaaacaatgtttgattcaaaatttgaacaaaattgttttaaataaattgtctgtataccagtacaagtttattgtttcagtatactcgtactaataaaataacagtgccaattgca

SEQ ID NO: 822 - RNA, 4347 nt, Homo sapiens
  source 1..4347: mol_type = transcribed RNA
agagctcgcctccctccgcctcagactgttttggtagcaacggcaacggcggcggcgcgtttcggcccggctcccggcggctccttggtctcggcgggcctccccgccccttcgtcgtcctccttctccccctcgccagcccgggcgcccctccggccgcgccaacccgcgcctccccgctcggcgcccgcgcgtccccgccgcgttccggcgtctccttggcgcgcccggctcccggctgtccccgcccggcgtgcgagccggtgtatgggcccctcaccatgtcgctgaagccccagcagcagcagcagcagcagcagcagcagcagcagcagcaacagcagcagcagcagcagcagcagcagccgccgcccgcggctgccaatgtccgcaagcccggcggcagcggccttctagcgtcgcccgccgccgcgccttcgccgtcctcgtcctcggtctcctcgtcctcggccacggctccctcctcggtggtcgcggcgacctccggcggcgggaggcccggcctgggcagaggtcgaaacagtaacaaaggactgcctcagtctacgatttcttttgatggaatctatgcaaatatgaggatggttcatatacttacatcagttgttggctccaaatgtgaagtacaagtgaaaaatggaggtatatatgaaggagtttttaaaacttacagtccgaagtgtgatttggtacttgatgccgcacatgagaaaagtacagaatccagttcggggccgaaacgtgaagaaataatggagagtattttgttcaaatgttcagactttgttgtggtacagtttaaagatatggactccagttatgcaaaaagagatgcttttactgactctgctatcagtgctaaagtgaatggcgaacacaaagagaaggacctggagccctgggatgcaggtgaactcacagccaatgaggaacttgaggctttggaaaatgacgtatctaatggatgggatcccaatgatatgtttcgatataatgaagaaaattatggtgtagtgtctacgtatgatagcagtttatcttcgtatacagtgcccttagaaagagataactcagaagaatttttaaaacgggaagcaagggcaaaccagttagcagaagaaattgagtcaagtgcccagtacaaagctcgagtggccctggaaaatgatgataggagtgaggaagaaaaatacacagcagttcagagaaattccagtgaacgtgaggggcacagcataaacactagggaaaataaatatattcctcctggacaaagaaatagagaagtcatatcctggggaagtgggagacagaattcaccgcgtatgggccagcctggatcgggctccatgccatcaagatccacttctcacacttcagatttcaacccgaattctggttcagaccaaagagtagttaatggaggtgttccctggccatcgccttgcccatctccttcctctcgcccaccttctcgctaccagtcaggtcccaactctcttccacctcgggcagccacccctacacggccgccctccaggcccccctcgcggccatccagacccccgtctcacccctctgctcatggttctccagctcctgtctctactatgcctaaacgcatgtcttcagaagggcctccaaggatgtccccaaaggcccagcgacatcctcgaaatcacagagtttctgctgggaggggttccatatccagtggcctagaatttgtatcccacaacccacccagtgaagcagctactcctccagtagcaaggaccagtccctcggggggaacgtggtcatcagtggtcagtggggttccaagattatcccctaaaactcatagacccaggtctcccagacagaacagtattggaaatacccccagtgggccagttcttgcttctccccaagctggtattattccaactgaagctgttgccatgcctattccagctgcatctcctacgcctgctagtcctgcatcgaacagagctgttaccccttctagtgaggctaaagattccaggcttcaagatcagaggcagaactctcctgcagggaataaagaaaatattaaacccaatgaaacatcacctagcttctcaaaagctgaaaacaaaggtatatcaccagttgtttctgaacatagaaaacagattgatgatttaaagaaatttaagaatgattttaggttacagccaagttctacttctgaatctatggatcaactactaaacaaaaatagagagggagaaaaatcaagagatttgatcaaagacaaaattgaaccaagtgctaaggattctttcattgaaaatagcagcagcaactgtaccagtggcagcagcaagccgaatagccccagcatttccccttcaatacttagtaacacggagcacaagaggggacctgaggtcacttcccaaggggttcagacttccagcccagcatgtaaacaagagaaagacgataaggaagagaagaaagacgcagctgagcaagttaggaaatcaacattgaatcccaatgcaaaggagttcaacccacgttccttctctcagccaaagccttctactaccccaacttcacctcggcctcaagcacaacctagcccatctatggtgggtcatcaacagccaactccagtttatactcagcctgtttgttttgcaccaaatatgatgtatccagtcccagtgagcccaggcgtgcaacctttatacccaatacctatgacgcccatgccagtgaatcaagccaagacatatagagcaggtaaagtaccaaatatgccccaacagcggcaagaccagcatcatcagagtgccatgatgcacccagcgtcagcagcgggcccaccgattgcagccaccccaccagcttactccacgcaatatgttgcctacagtcctcagcagttcccaaatcagccccttgttcagcatgtgccacattatcagtctcagcatcctcatgtctatagtcctgtaatacagggtaatgctagaatgatggcaccaccaacacacgcccagcctggtttagtatcttcttcagcaactcagtacggggctcatgagcagacgcatgcgatgtatgcatgtcccaaattaccatacaacaaggagacaagcccttctttctactttgccatttccacgggctcccttgctcagcagtatgcgcaccctaacgctaccctgcacccacatactccacaccctcagccttcagctacccccactggacagcagcaaagccaacatggtggaagtcatcctgcacccagtcctgttcagcaccatcagcaccaggccgcccaggctctccatctggccagtccacagcagcagtcagccatttaccacgcggggcttgcgccaactccaccctccatgacacctgcctccaacacgcagtcgccacagaatagtttcccagcagcacaacagactgtctttacgatccatccttctcacgttcagccggcgtataccaacccaccccacatggcccacgtacctcaggctcatgtacagtcaggaatggttccttctcatccaactgcccatgcgccaatgatgctaatgacgacacagccacccggcggtccccaggccgccctcgctcaaagtgcactacagcccattccagtctcgacaacagcgcatttcccctatatgacgcacccttcagtacaagcccaccaccaacagcagttgtaaggctgccctggaggaaccgaaaggccaaattccctcctcccttctactgcttctaccaactggaagcacagaaaactagaatttcatttattttgtttttaaaatatatatgttgatttcttgtaacatccaataggaatgctaacagttcacttgcagtggaagatacttggaccgagtagaggcatttaggaacttgggggctattccataattccatatgctgtttcagagtcccgcaggtaccccagctctgcttgccgaaactggaagttatttattttttaataacccttgaaagtcatgaacacatcagctagcaaaagaagtaacaagagtgattcttgctgctattactgctaaaaaaaaaaaaaaaaaaaaatcaagacttggaacgcccttttactaaacttgacaaagtttcagtaaattcttaccgtcaaactgacggattattatttataaatcaagtttgatgaggtgatcactgtctacagtggttcaacttttaagttaagggaaaaacttttactttgtagataatataaaataaaaacttaaaaaaaatttaaaaaataaaaaaagttttaaaaactga

SEQ ID NO: 823 - RNA, 6884 nt, Homo sapiens
  source 1..6884: mol_type = transcribed RNA
gtgggggccgttggctccagacaaataaacatggagtccatcttccacgagaaacaagaaggctcactttgtgctcaacattgcctgaataacttattgcaaggagaatattttagccctgtggaattatcctcaattgcacatcagctggatgaggaggagaggatgagaatggcagaaggaggagttactagtgaagattatcgcacgtttttacagcagccttctggaaatatggatgacagtggttttttctctattcaggttataagcaatgccttgaaagtttggggtttagaactaatcctgttcaacagtccagagtatcagaggctcaggatcgatcctataaatgaaagatcatttatatgcaattataaggaacactggtttacagttagaaaattaggaaaacagtggtttaacttgaattctctcttgacgggtccagaattaatatcagatacatatcttgcacttttcttggctcaattacaacaggaaggttattctatatttgtcgttaagggtgatctgccagattgcgaagctgaccaactcctgcagatgattagggtccaacagatgcatcgaccaaaacttattggagaagaattagcacaactaaaagagcaaagagtccataaaacagacctggaacgagtgttagaagcaaatgatggctcaggaatgttagacgaagatgaggaggatttgcagagggctctggcactaagtcgccaagaaattgacatggaagatgaggaagcagatctccgcagggctattcagctaagtatgcaaggtagttccagaaacatatctcaagatatgacacagacatcaggtacaaatcttacttcagaagagcttcggaagagacgagaagcctactttgaaaaacagcagcaaaagcagcaacagcagcagcagcagcagcagcagggggacctatcaggacagagttcacatccatgtgaaaggccagccaccagttcaggagcacttgggagtgatctaggtgatgctatgagtgaagaagacatgcttcaggcagctgtgaccatgtctttagaaactgtcagaaatgatttgaaaacagaaggaaaaaaataatacctttaaaaaataatttagatattcatactttccaacattatcctgtgtgattacagcatagggtccactttggtaatgtgtcaaagagatgaggaaataagacttttagcggtttgcaaacaaaatgatgggaaagtggaacaatgcgtcggttgtaggactaaataatgatcttccaaatattagccaaagaggcattcagcaattaaagacatttaaaatagttttctaaatgtttctttttcttttttgagtgtgcaatatgtaacatgtctaaagttagggcatttttcttggatctttttgcagactagctaattagctctcgcctcaggctttttccatatagtttgttttctttttctgtcttgtaggtaagttggctcacatcatgtaatagtggctttcatttcttattaaccaaattaacctttcaggaaagtatctctactttcctgatgttgataatagtaatggttctagaaggatgaacagttctcccttcaactgtataccgtgtgctccagtgttttcttgtgttgttttctctgatcacaacttttctgctacctggttttcattattttcccacaattcttttgaaagatggtaatcttttctgaggtttagcgttttaagccctacgatgggatcattatttcatgactggtgcgttcctaaactctgaaatcagccttgcacaagtacttgagaataaatgagcattttttaaaatgtgtgagcatgtgctttcccagatgctttatgaatgtcttttcacttatatcaaaaccttacagctttgttgcaaccccttcttcctgcgccttattttttcctttcttctccaattgagaaaactaggagaagcatagtatgcaggcaagtctccttctgttagaagactaaacatacgtacccaccatgaatgtatgatacatgaaatttggccttcaattttaatagcagttttattttattttttctcctatgactggagctttgtgttctctttacagttgagtcatggaatgtaggtgtctgcttcacatcttttagtaggtatagcttgtcaaagatggtgatctggaacatgaaaataatttactaatgaaaatatgtttaaatttatactgtgatttgacacttgcatcatgtttagatagcttaagaacaatggaagtcacagtacttagtggatctataaataagaaagtccatagttttgataaatattctctttaattgagatgtacagagagtttcttgctgggtcaataggatagtatcattttggtgaaaaccatgtctctgaaattgatgttttagtttcagtgttccctatccctcattctccatctccttttgaagctcttttgaatgttgaattgttcataagctaaaatccaagaaatttcagctgacaacttcgaaaattataatatggtatattgccctcctggtgtgtggctgcacacattttatcagggaaagttttttgatctaggatttattgctaactaactgaaaagagaagaaaaaatatcttttatttatgattataaaatagctttttcttcgatataacagattttttaagtcattattttgtgccaatcagttttctgaagtttcccttacacaaaaggatagctttattttaaaatctaaagtttcttttaatagttaaaaatgtttcagaagaattataaaactttaaaactgcaagggatgttggagtttagtactactccctcaagatttaaaaagctaaatattttaagactgaacatttatgttaattattaccagtgtgtttgtcatattttccatggatatttgttcattacctttttccattgaaaagttacattaaacttttcatacacttgaattgatgagctacctaatataaaaatgagaaaaccaatatgcattttaaagttttaactttagagtttataaagttcatatataccctagttaaagcacttaagaaaatatggcatgtttgacttttagttcctagagagtttttgtttttgtttttgtttttttttgagacggagtcttgctatgtctcccaggctggagggcagtggcatgatctcggctcactacaacttccacctcccgggttcaagcaattctcctgcctcagcctccagagtagctgggattacaggcgcccaccaccacacccggcagatttttgtatttttggtagagacgcggtttcatcatgtttggccaggctggtctcgaactcctgacctcaggtgatccgcctgccttggcctcccaaagtgttgggattacaggcatgagccactgcgcctggccagctagagagtttttaaagcagagctgagcacacactggatgcgtttgaatgtgtttgtgtagtttgttgtgaaattgttacatttagcaggcagatccagaagcactagtgaactgtcatcttggtggggttggcttaaatttaattgactgtttagattccatttcttaattgattggccagtatgaaaagatgccagtgcaagtaaccatagtatcaaaaaagttaaaaattattcaaagctatagtttatacatcaggtactgccatttactgtaaaccacctgcaagaaagtcaggaacaactaaattcacaagaactgtcctgctaagaagtgtattaaagatttccattttgttttactaattgggaacatcttaatgtttaatatttaaactattggtatcatttttctaatgtataatttgtattactgggatcaagtatgtacagtggtgatgctagtagaagtttaagccttggaaataccactttcatattttcagatgtcatggatttaatgagtaatttatgtttttaaaattcagaatagttaatctctgatctaaaaccatcaatctatgttttttacggtaatcatgtaaatatttcagtaatataaactgtttgaaaaggctgctgcaggtaaactctatactaggatcttggccaaataatttacaattcacagaatattttatttaaggtggtgctttttttttttgtccttaaaacttgatttttcttaactttattcatgatgccaaagtaaatgaggaaaaaaactcaaaaccagttgagtatcattgcagacaaaactaccagtagtccatattgtttaatattaagttgaataaaataaattttatttcagtcagagcctaaatcacattttgattgtctgaatttttgatactatttttaaaatcatgctagtggcggctgggcgtggtagctcacgcctgtaatcccagcattttgggaggccgaagtgggtggatcacgaggtcgggagttcgagaccagcttggccaaaatggtgaaaccccatctgtactaaaaactacaaaaattagctgggcgcggtggcaggtgcctgtaatcccagctacctgggagtctgaggcaggagaattgcttgaaccctggcgacagaggatgcagtgagccaagatggtgccactgtactccagactgggcgacagagtgagactctgtctcaaaaaaaaaaaaaaaatcatgctagtgccaagagctactaaattcttaaaaccggcccattggacctgtacagataaaaaatagattcagtgcataatcaaaatatgataattttaaaatcttaagtagaaaaataaatcttgatgttttaaattcttacgaggattcaatagttaatattgatgatctcccggctgggtgcagtggctcacgcctgtaatcccagcagttctggaggctgaggtgggcgaatcacttcaggccaggagttcaagaccagtctgggcaacatggtgaaacctcgtttctactaaaaatacaaaaattagccgggcgtggttgcacacacttgtaatcccagctactcaggaggctaagaatcgcatgagcctaggaggcagaggttgcagagtgccaagggctcaccactgcattccagcctgcccaacagagtgagacactgtttctgaaaaaaaaaaatatatatatatatatatatatgtgtgtatatatatatgtatatatatatgacttcctattaaaaactttatcccagtcgggggcagtggctcacgcctgtaatcccaacactttgggaggctgaggcaggtggatcacctgaagtccggagtttgagaccagcctggccaacatggtgaaaccccatctctactaaaaatacaaaacttaagccaggtatggtggcgggcacctgtaatcccagttacttgggaggctgaggcaggagaatcgtttaaacccaggaggtggaggttgcagtgagctgagatcgtgccattgcactctagcctgggcaacaagagtaaaactccatcttaaaggtttgtttgtttttttttaatccggaaacgaagaggcgttgggccgctattttctttttctttctttctttctttctttttttttttttctgagacggagtctagctctgctgcccaggctggagtacaatgacacgatgttggctcactgcaacctccacctcctgggttcaagcgattctcctgcctcagcctcccaagtacctgggattacaggcacctgccactacacctggcgaatatttgttttttttagtagagacgggcttttaccatgttaggctggtctcaaactcctgacctcaggtgatctgcctgccttggcctcccaaagtgctgggattacaggtgcaggccaccacacccggccttgggccactgttttcaaagtgaattgtttgttgtatcgagtccttaagtatggatatatatgtgaccctaattaagaactaccagattggatcaactaatcatgtcagcaatgtaaataactttatttttcatattcaaaataaaaactttcttttatttctggcccctttataaccagcatctttttgctttaaaaaatgacctggctttgtatttttttagtcttaaacataataaaaatatttttgttctaatttgctttcatgagtgaagattattgacatcgttggtaaattctagaattttgattttgttttttaatttgaagaaaatctttgctattattattttttccaagtggtctggcattttaagaattagtgctaataacgtaacttctaaatttgtcgtaattggcatgtttaatagcatatcaaaaaacattttaagcctgtggattcatagacaaagcaatgagaaacattagtaaaatataaatggatattcctgatgcatttaggaagctctcaattgtctcttgcatagttcaaggaatgttttctgaatttttttaatgctttttttttttttgaaagaggaaaacatacatttttaaatgtgattatctaatttttacaacactgggctattaggaataactttttaaaaattactgttctgtataaatatttgaaattcaagtacagaaaatatctgaaacaaaaagcattgttgtttggccatgatacaagtgcactgtggcagtgccgcttgctcaggacccagccctgcagcccttctgtgtgtgctccctcgttaagttcatttgctgttattacacacacaggccttcctgtctggtcgttagaaaagccgggcttccaaagcactgttgaacacaggattctgttgttagtgtggatgttcaatgagttgtattttaaatatcaaagattattaaataaagataatgtttgcttttcta

SEQ ID NO: 824 - RNA, 8660 nt, Homo sapiens
  source 1..8660: mol_type = transcribed RNA
ctccggggtcagccaggaagatgtcccgagctgctatccccggctcggcccgggcagccgccttctgagcccccgacccgaggcgccgagccgccgccgcccgatgggctgggccgtggagcgtctccgcagtcgtagctccagccgccgcgctcccagccccggcagcctcagcatcagcggcggcggcggcggcggcggcgtcttccgcatcgttcgccgcagcgtaacccggagccctttgctctttgcagaatggcccgcttcggagacgagatgccggcccgctacgggggaggaggctccggggcagccgccggggtggtcgtgggcagcggaggcgggcgaggagccgggggcagccggcagggcgggcagcccggggcgcaaaggatgtacaagcagtcaatggcgcagagagcgcggaccatggcactctacaaccccatccccgtccgacagaactgcctcacggttaaccggtctctcttcctcttcagcgaagacaacgtggtgagaaaatacgccaaaaagatcaccgaatggcctccctttgaatatatgattttagccaccatcatagcgaattgcatcgtcctcgcactggagcagcatctgcctgatgatgacaagaccccgatgtctgaacggctggatgacacagaaccatacttcattggaattttttgtttcgaggctggaattaaaatcattgcccttgggtttgccttccacaaaggctcctacttgaggaatggctggaatgtcatggactttgtggtggtgctaacgggcatcttggcgacagttgggacggagtttgacctacggacgctgagggcagttcgagtgctgcggccgctcaagctggtgtctggaatcccaagtttacaagtcgtcctgaagtcgatcatgaaggcgatgatccctttgctgcagatcggcctcctcctattttttgcaatccttatttttgcaatcatagggttagaattttatatgggaaaatttcataccacctgctttgaagaggggacagatgacattcagggtgagtctccggctccatgtgggacagaagagcccgcccgcacctgccccaatgggaccaaatgtcagccctactgggaagggcccaacaacgggatcactcagttcgacaacatcctgtttgcagtgctgactgttttccagtgcataaccatggaagggtggactgatctcctctacaatagcaacgatgcctcagggaacacttggaactggttgtacttcatccccctcatcatcatcggctccttttttatgctgaaccttgtgctgggtgtgctgtcaggggagtttgccaaagaaagggaacgggtggagaaccggcgggcttttctgaagctgaggcggcaacaacagattgaacgtgagctcaatgggtacatggagtggatctcaaaagcagaagaggtgatcctcgccgaggatgaaactgacggggagcagaggcatccctttgatggagctctgcggagaaccaccataaagaaaagcaagacagatttgctcaaccccgaagaggctgaggatcagctggctgatatagcctctgtgggttctcccttcgcccgagccagcattaaaagtgccaagctggagaactcgaccttttttcacaaaaaggagaggaggatgcgtttctacatccgccgcatggtcaaaactcaggccttctactggactgtactcagtttggtagctctcaacacgctgtgtgttgctattgttcactacaaccagcccgagtggctctccgacttcctttactatgcagaattcattttcttaggactctttatgtccgaaatgtttataaaaatgtacgggcttgggacgcggccttacttccactcttccttcaactgctttgactgtggggttatcattgggagcatcttcgaggtcatctgggctgtcataaaacctggcacatcctttggaatcagcgtgttacgagccctcaggttattgcgtattttcaaagtcacaaagtactgggcatctctcagaaacctggtcgtctctctcctcaactccatgaagtccatcatcagcctgttgtttctccttttcctgttcattgtcgtcttcgcccttttgggaatgcaactcttcggcggccagtttaatttcgatgaagggactcctcccaccaacttcgatacttttccagcagcaataatgacggtgtttcagatcctgacgggcgaagactggaacgaggtcatgtacgacgggatcaagtctcaggggggcgtgcagggcggcatggtgttctccatctatttcattgtactgacgctctttgggaactacaccctcctgaatgtgttcttggccatcgctgtggacaatctggccaacgcccaggagctcaccaaggtggaggcggacgagcaagaggaagaagaagcagcgaaccagaaacttgccctacagaaagccaaggaggtggcagaagtgagtcctctgtccgcggccaacatgtctatagctgtgaaagagcaacagaagaatcaaaagccagccaagtccgtgtgggagcagcggaccagtgagatgcgaaagcagaacttgctggccagccgggaggccctgtataacgaaatggacccggacgagcgctggaaggctgcctacacgcggcacctgcggccagacatgaagacgcacttggaccggccgctggtggtggacccgcaggagaaccgcaacaacaacaccaacaagagccgggcggccgagcccaccgtggaccagcgcctcggccagcagcgcgccgaggacttcctcaggaaacaggcccgctaccacgatcgggcccgggaccccagcggctcggcgggcctggacgcacggaggccctgggcgggaagccaggaggccgagctgagccgggagggaccctacggccgcgagtcggaccaccacgcccgggagggcagcctggagcaacccgggttctgggagggcgaggccgagcgaggcaaggccggggacccccaccggaggcacgtgcaccggcaggggggcagcagggagagccgcagcgggtccccgcgcacgggcgcggacggggagcatcgacgtcatcgcgcgcaccgcaggcccggggaggagggtccggaggacaaggcggagcggagggcgcggcaccgcgagggcagccggccggcccggggcggcgagggcgagggcgagggccccgacgggggcgagcgcaggagaaggcaccggcatggcgctccagccacgtacgagggggacgcgcggagggaggacaaggagcggaggcatcggaggaggaaagagaaccagggctccggggtccctgtgtcgggccccaacctgtcaaccacccggccaatccagcaggacctgggccgccaagacccacccctggcagaggatattgacaacatgaagaacaacaagctggccaccgcggagtcggccgctccccacggcagccttggccacgccggcctgccccagagcccagccaagatgggaaacagcaccgaccccggccccatgctggccatccctgccatggccaccaacccccagaacgccgccagccgccggacgcccaacaacccggggaacccatccaatcccggcccccccaagacccccgagaatagccttatcgtcaccaaccccagcggcacccagaccaattcagctaagactgccaggaaacccgaccacaccacagtggacatccccccagcctgcccaccccccctcaaccacaccgtcgtacaagtgaacaaaaacgccaacccagacccactgccaaaaaaagaggaagagaagaaggaggaggaggaagacgaccgtggggaagacggccctaagccaatgcctccctatagctccatgttcatcctgtccacgaccaacccccttcgccgcctgtgccattacatcctgaacctgcgctactttgagatgtgcatcctcatggtcattgccatgagcagcatcgccctggccgccgaggaccctgtgcagcccaacgcacctcggaacaacgtgctgcgatactttgactacgtttttacaggcgtctttacctttgagatggtgatcaagatgattgacctggggctcgtcctgcatcagggtgcctacttccgtgacctctggaatattctcgacttcatagtggtcagtggggccctggtagcctttgccttcactggcaatagcaaaggaaaagacatcaacacgattaaatccctccgagtcctccgggtgctacgacctcttaaaaccatcaagcggctgccaaagctcaaggctgtgtttgactgtgtggtgaactcacttaaaaacgtcttcaacatcctcatcgtctacatgctattcatgttcatcttcgccgtggtggctgtgcagctcttcaaggggaaattcttccactgcactgacgagtccaaagagtttgagaaagattgtcgaggcaaatacctcctctacgagaagaatgaggtgaaggcgcgagaccgggagtggaagaagtatgaattccattacgacaatgtgctgtgggctctgctgaccctcttcaccgtgtccacgggagaaggctggccacaggtcctcaagcattcggtggacgccacctttgagaaccagggccccagccccgggtaccgcatggagatgtccattttctacgtcgtctactttgtggtgttccccttcttctttgtcaatatctttgtggccttgatcatcatcaccttccaggagcaaggggacaagatgatggaggaatacagcctggagaaaaatgagagggcctgcattgatttcgccatcagcgccaagccgctgacccgacacatgccgcagaacaagcagagcttccagtaccgcatgtggcagttcgtggtgtctccgcctttcgagtacacgatcatggccatgatcgccctcaacaccatcgtgcttatgatgaagttctatggggcttctgttgcttatgaaaatgccctgcgggtgttcaacatcgtcttcacctccctcttctctctggaatgtgtgctgaaagtcatggcttttgggattctgaattatttccgcgatgcctggaacatcttcgactttgtgactgttctgggcagcatcaccgatatcctcgtgactgagtttgggaatccgaataacttcatcaacctgagctttctccgcctcttccgagctgcccggctcatcaaacttctccgtcagggttacaccatccgcattcttctctggacctttgtgcagtccttcaaggccctgccttatgtctgtctgctgatcgccatgctcttcttcatctatgccatcattgggatgcaggtgtttggtaacattggcatcgacgtggaggacgaggacagtgatgaagatgagttccaaatcactgagcacaataacttccggaccttcttccaggccctcatgcttctcttccggagtgccaccggggaagcttggcacaacatcatgctttcctgcctcagcgggaaaccgtgtgataagaactctggcatcctgactcgagagtgtggcaatgaatttgcttatttttactttgtttccttcatcttcctctgctcgtttctgatgctgaatctctttgtcgccgtcatcatggacaactttgagtacctcacccgagactcctccatcctgggcccccaccacctggatgagtacgtgcgtgtctgggccgagtatgaccccgcagcttggggccgcatgccttacctggacatgtatcagatgctgagacacatgtctccgcccctgggtctggggaagaagtgtccggccagagtggcttacaagcggcttctgcggatggacctgcccgtcgcagatgacaacaccgtccacttcaattccaccctcatggctctgatccgcacagccctggacatcaagattgccaagggaggagccgacaaacagcagatggacgctgagctgcggaaggagatgatggcgatttggcccaatctgtcccagaagacgctagacctgctggtcacacctcacaagtccacggacctcaccgtggggaagatctacgcagccatgatgatcatggagtactaccggcagagcaaggccaagaagctgcaggccatgcgcgaggagcaggaccggacacccctcatgttccagcgcatggagcccccgtccccaacgcaggaagggggacctggccagaacgccctcccctccacccagctggacccaggaggagccctgatggctcacgaaagcggcctcaaggagagcccgtcctgggtgacccagcgtgcccaggagatgttccagaagacgggcacatggagtccggaacaaggcccccctaccgacatgcccaacagccagcctaactctcagtccgtggagatgcgagagatgggcagagatggctactccgacagcgagcactacctccccatggaaggccagggccgggctgcctccatgccccgcctccctgcagagaaccagaggagaaggggccggccacgtgggaataacctcagtaccatctcagacaccagccccatgaagcgttcagcctccgtgctgggccccaaggcccgacgcctggacgattactcgctggagcgggtcccgcccgaggagaaccagcggcaccaccagcggcgccgcgaccgcagccaccgcgcctctgagcgctccctgggccgctacaccgatgtggacacaggcttggggacagacctgagcatgaccacccaatccggggacctgccgtcgaaggagcgggaccaggagcggggccggcccaaggatcggaagcatcgacagcaccaccaccaccaccaccaccaccaccatcccccgccccccgacaaggaccgctatgcccaggaacggccggaccacggccgggcacgggctcgggaccagcgctggtcccgctcgcccagcgagggccgagagcacatggcgcaccggcagtagttccgtaagtggaagcccagccccctcaacatctggtaccagcactccgcggcggggccgccgccagctcccccagaccccctccaccccccggccacacgtgtcctattcccctgtgatccgtaaggccggcggctcggggcccccgcagcagcagcagcagcagcagcagcagcagcagcagcaggcggtggccaggccgggccgggcggccaccagcggccctcggaggtacccaggccccacggccgagcctctggccggagatcggccgcccacggggggccacagcagcggccgctcgcccaggatggagaggcgggtcccaggcccggcccggagcgagtcccccagggcctgtcgacacggcggggcccggtggccggcatctggcccgcacgtgtccgaggggcccccgggtccccggcaccatggctactaccggggctccgactacgacgaggccgatggcccgggcagcgggggcggcgaggaggccatggccggggcctacgacgcgccaccccccgtacgacacgcgtcctcgggcgccaccgggcgctcgcccaggactccccgggcctcgggcccggcctgcgcctcgccttctcggcacggccggcgactccccaacggctactacccggcgcacggactggccaggccccgcgggccgggctccaggaagggcctgcacgaaccctacagcgagagtgacgatgattggtgctaagcccgggcgaggtggcgcccgcccggccccccacgcaccccacgcacacaccccacccgaggagccgcgcagaggccgcgggggcccagcacagagggcccgggagagggccagccgggagaccccagactctggagaggccagggctgggccacaagggtgtcccgcagagaccctcggccaaaagagaccctcctgggcagccacggcgccccccaaccagccccgatccccccacccacgacaggggctctcgggtgggaggcagggagcagacaaaccacacagccaagggatttgaattaactcagccatttttggagaactttggggaacatgaaaaaaaaaaaaaaaaaaaaaaaaaaaaacatttttaaaagaaaaaacggggagaaaaaaatagcttctattgatgagttttatcatctcaattgaatctttcctttccctgatgaagacagctggtggccgagtgcggcaaagaagccagaaggaaccagaatcccagtgccctacacccaccaccagacacactcacacccacacacgttctcagacacacacaagagtgcttgccggttataccaaaccctactattactgcctgcagaaatcaatttaaaaaaataataataacaataaacaattttaaaaaggacaaaaaaattaatgattgagaaaagaggcatttttttctgacatttggtcctgcttgaaacaacaaaagaagaagaaaaacccaccatcaccaccgattcctttgcttcttttttccttttttcctaccttgtttgaaaaccgtgggcttgggactgtgaattattgcatgacattcaaaaagaaaaaaaaaataaaaaaaagttgaatcaaa

SEQ ID NO: 825 - RNA, 7076 nt, Homo sapiens
  source 1..7076: mol_type = transcribed RNA
acaatgcagccgggtaaacagccatggaggaggaggcggcggcgcccgcggccgcctgctccgacgcctgagccgcgccgcgccgcgccgccgccgccgccgccgccgccgcgggacccgcgctccccgcgctcccggtactccccgggggcggccgcggccggcgcgagttggggcgaggcttggcggccggcggcggccccggctgcagcccgggctcccgccgccccccttgcagcccccgcccggcccacgcccagaggccgccccggaggccgcagccagccgccagatctgaacagaattaagacgaacgagctttcacaattgcagcagatgaagatccattggtaaattgatcaggatttttggcctaccctccaaagaaaaggagcggaaagaatgtcggagcgggccgcggatgacgtcaggggggagccgcgccgcgcggcggcggcggcgggcggagcagcggccgcggccgcccggcagcagcagcagcagcagcagcagcagcagccgccgcctccgcagccccagcggcagcagcacccgccaccgccgccacggcgcacacggccggaggacggcgggcccggcgccgcctccacctcggccgccgcaatggcgacggtcggggagcgcaggcctctgcccagtcctgaagtgatgctgggacagtcgtggaatctgtgggttgaggcttccaaacttcctgggaaggacgggacagaattggacgaaagtttcaaggagtttgggaaaaaccgcgaagtcatggggctctgtcgggaagacatgccaatatttggtttctgtccagcccatgatgatttctacttggtggtgtgtaacgactgtaatcaggttgtcaaaccgcaggcatttcaatcacattatgaaagaagacatagctcatccagcaagccgcctttggccgttcctcccacttcagtattttccttcttcccttctctgtccaaaagcaaaggaggcagtgcaagtggaagcaaccgttcttccagtggaggtgttcttagcgcatcctcatcaagttccaagttgttgaaatcacccaaagagaaactgcagctcagggggaacaccaggccaatgcatcccattcagcaaagtagagttccccatggtagaatcatgacaccctctgtgaaagtggaaaagattcatccgaaaatggatggcacactactgaaatctgcggtggggccaacctgtcctgctactgtgagttccttagtcaagcctggccttaactgcccctcaataccaaagccaaccttgccttcacctggacagattctgaatggcaaagggcttcctgcaccgcccactctggaaaagaaacctgaagacaattccaataataggaaatttttaaataagagattatcagaaagagagtttgatcctgacatccactgtggggttattgatctcgacaccaagaagccctgcacccggtctttgacatgcaagacacattccttaacccagcgcagggctgtccagggtagaagaaaacgatttgatgtgttattagccgagcacaaaaacaaaaccagggaaaaggaattgattcgccatccggactctcagcaaccaccgcagcctctcagggacccgcatcccgcccctcctagaacgtcacaggagccgcaccaaaaccctcacggagtgattccttccgaatcaaagccttttgtagctagtaaacctaaacctcacacccccagtcttccaaggcctccaggctgccctgctcagcaaggtgggagtgcccccattgaccctcctccagtccatgaatctccacaccctcccctgcctgccactgagccagcttctcggttatccagtgaggagggcgaaggcgatgacaaagaagagtctgttgaaaaactggactgtcattattcaggtcatcatcctcagccagcatctttttgcacatttgggagccggcagataggaagaggctattacgtgtttgactccaggtggaatcgacttcgctgcgccctcaacctcatggtggagaagcatctgaatgcacagctatggaagaaaatcccaccagtgcccagtaccacctcacccatctccacacgtattcctcaccggacaaactctgtgccgacatcacaatgtggagtcagctatctggcagcagccaccgtctctacatccccagtcctgctctcatctacctgcatctccccaaatagcaaatcggtaccagctcatggaaccacactaaatgcacagcctgctgcttcaggggcgatggatcctgtgtgcagtatgcaatccagacaagtgtcctcttcatcctcatccccttccacgccctctggcctttcctcggttccttcctcccccatgtccaggaaacctcagaaattgaaatccagcaaatctttgaggcccaaggagtcttctggtaacagcactaactgtcaaaatgccagtagcagtaccagtggcggctcaggaaagaaacgcaaaaacagttccccactgttggttcactcttcctcctcctcttcctcctcctcctcttcttctcattccatggagtcttttaggaaaaactgtgtggctcactctgggcctccctacccctcaacggtaacatcttcccatagcatcggcctcaactgtgtgacgaataaagcaaatgcggtgaacgtccggcatgaccagtcagggaggggcccccccaccgggagccctgctgaatccatcaagaggatgagtgtgatggtgaacagcagtgattctactctttctcttgggccattcattcaccagtccaatgaactgcctgtcaactcccacggcagtttttcccactcacacactcctctagacaaactcataggaaagaaaagaaagtgctcacccagctcgagcagcatcaacaacagcagcagcaaacccacaaaggttgccaaagtgccagccgtgaacaatgtccacatgaaacacacaggcaccatcccaggggcacaaggactgatgaacagttccctccttcatcagccaaaggcacgtccctgacagctgaaaatagcacggggaggaataatgcggacacttttgaggacaagttacacctccactcagcactctggactccacgatgcctttgagtctgttttcccaacctcctgtgggcctcaagggtagaaacctgccgggctgttgttttaacgaggatttccctgaagctatgtctctagcagtgagtactcataaaggacactggatcaagttcagccaccgaattgcttttatcagtgttaaagtggtctgaactgcttgctaccaatctgtgagaagtttttgtttttgttttgttttttaacttgcagtatatcacagagccactcttcaagtagattggctgggcaaaagaatgttttggcaagagcgttactgtagacctttctccctccttccttttactaccatttttttttaacactgtcatctgtaggtcactctccagcagttaggcaccttaactggagaccagaaaccttccagagaacacagggctgcatcccgagcaaccctctgaagaagggaattaggctttagattttgatagcaatgttccaggaatgaaatatagatgttagcccaagacaccatgacaaaatagcccagccttttgagagtaatttgggaaaagaagctgtcagaagtttctaacttacaaactggtttgaaatttttgatgcccagacagcaagtataaatcattttggaggcttacttttcatgatacaaaagcaattctgtgtgatttttttttttaagaagaaagaaaatgcaagctagttttgagaaaggaaggccaaattgggtcgggggagggtgggagtgaggaagttaaaatcactatagggagaaaaaacttttttcaagatttccaaagagatgaaattttcttaatccttttaagttttcatagtaaacagtatggcagattgggttggttgtcctacctggtctatttttaaaagtcaccttttaaagtgacattattagatacacttaaatgtttccaaggcactctctacattacccttgtttttctctttggatactgtcctgggactaagtgtagatttctgcttcaagcacttctggcattgtgtgtttttgtatgcactccccttcatgccacttcagatgtttatttggatgtggttggggacgagagcagacaccaaggaaagggagttggagagaatgtaagtcctgacctgaaggtcttttgtgatgcatgtataggattgccctgacacacaccctcctttcttgggattataccagccatcttcctgagagttttggagccctctaggatattttttctagtaccccaccccccacccctaaagaaagaccttaatatgttaaaacagcattgcttggagaaggtgtcattgaattccgggacgagccggagcctttaaatgggtgcttccaccactacaggctcctgacacgagtaacaggcactgttgcttagaagaacacacgaagttgccgaacacagggtaaaatttccaaggcgctgatcgttgccctggccagggcctgatgagagccagtcagtacattctttttttcctacagttcttgggtttcaaacttcagtttcagggaatttcaagtcaacaacaggtagaatgaataaacttggttaccagcctaataatgtgaattgctacagaattattcttattatgtaagaaaacaaaaactttatgcagatactttagctataaattgatgtaaaatactgatttttttaaaggaaggagagaacagtatcttgttcaattattatgcaatcaatcagtaaatgtttttaaaatgatactacaggagagcttagtaaggagagggcatggatgggccagtttggcatagttgggagaaatcagtctggtttccatcccagtcggggaagagagaggtgagagggaatcagaacgtacctagttgattccttggtgacaagtgcaatggggtatgggtagaatttattttcagagccaagaggacttgatggttataaataaagttgcctttagcaatggaatttacagatcgatcatgttgttccgaaagatgtgaataggatccacaataacaagttgattcagactaatgtagatatttagattagcaagtattgaacatttgatttcttagactgaggttttaaatgaatttcattatttctcccggtaatacacagagcatcgggattaggaaattagccattttggattctgtctgccacaaacagacctattctaaacagtgctattaaattttagactgttgttcaaatattttattttctcctaaactactttttatggtgatgaataattaagaccatttaaaacacgggagtacaagtatttttttgaattaaattaacttgcaaaaaccaaatttgcagtggttgggttgtttctagacagactttggtatcaatttaaaaccaagataatttttatattctttccaatagaatttcatgacaactcctgcagttttcttaacctacaaaaaaaaaaaaaaagtgctgcaatgatgaacaaagaattatacaaaacctacttttgtatctttattttggaatttcttgttctattataaatatggaagtatccctatttcagaagacatattttgttaaaaatgaattgtacatatttaaatatgtatttttgcacaggtctttttttctgatatcctgttttggtacaattgagatcatctagtatttatttattaattaataaaagtaaatacctttttataatttgaagtggttcactgccaagccaatagttctagaacctgcctcctttacagttttaagggatgcctctgttctgtgaaaagtctttgtcccttttagtgtctcgggagtggattcatacagatgaagtgggcattgcttcttcctggttgcctggtttcccgatagactacatgtaactaagtgacacactgcttttcttttgttagtattttatgtgtgggagtatgtgactgcgtgtgtgtgtgcctgtgcgtgtgtgtgtatactcagcacatgtatgttactatgtgatgtggtttaaaactaatggaaaaaactgaaagtgcctgaaactagttttaagcttagacagaatctctttaaaaagacttgaatgttcagttgaacttttggagtttgctttttccacctaaatattgtttctaaaattttaggggcggagttgaaaaccaccaatgctggtaattttataaggtattttaaaattaagacctcttggttcatagtaattcaattggtgatggattgcctggtggcaccaagggttacagatctttttgtcagccagcaacttacacgatgtgtccgttttgttattcactcatgaaatacaatttaaaatatttaaaatattttgtattccaaaaatataatacaaagaagtacctctgagaacattgaaaaaaatgtataatttgaaaaatgtaacttataagggcagctgtcttcctgcaagagttctgttgccaaggaatttcttaatgtcgctcattctgtccagggggtttggggcgattgggctttgaaaaaatattcttaaaagtttgtttagcagaaaataatcacttttacattttgtgcaaaacattttacattttcagataatttaaatgagcactacatactgtcagtgtgaatgtagggccttgaaagcattttgcttttttttttttttttttttttttgagcttggttataaaagcaatctcctgtgttaaaaacgtgtgaatagtttgataatttgtacacataatcaagagcatctcagctggactttgtgttggctgctgtatagaacatgaacaaatgtcaagggatagaaaattactttggatatttaaaagagaagaaatatatagtctatttgttttgtaacaagtttctgtaaataaaataatttatactatttataagaaaa

SEQ ID NO: 826 - RNA, 10958 nt, Homo sapiens
  source 1..10958: mol_type = transcribed RNA
gagtttgagctgcatgcagaaatgtaaggcagtgcttcctggcgctgatggcaaaatgggacccatctccagttattcctcgggcaccccagctttgcaaatctgggaaagaacctacataaacatattggtgatgtagccagcttaaaaggccgagagaatccttatggattcaggagactgtttttttatttagatttttattttttatttggaagatgaaatgcttctctcgttacctgccttacatcttcagacctccgaacaccatcctttcttccagctgccacacagaaggctcggaccatggtgcagtcccactggctcccctgcccccctctcctgtgagactggctgcggggagggatcatggatacttgtctgccggcttctggttcccacgcaagtaagcctgctgtcaatggaggaggacattgatacccgcaaaatcaacaacagtttcctgcgcgaccacagctatgcgaccgaagctgacattatctctacggtagaattcaaccacacgggagaattactagcgacaggggacaaggggggtcgggttgtaatatttcaacgagagcaggagagtaaaaatcaggttcatcgtaggggtgaatacaatgtttacagcacattccagagccatgaacccgagttcgattacctgaagagtttagaaatagaagaaaaaatcaataaaataagatggctcccccagcagaatgcagcttactttcttctgtctactaatgataaaactgtgaagctgtggaaagtcagcgagcgtgataagaggccagaaggctacaatctgaaagatgaggagggccggctccgggatcctgccaccatcacaaccctgcgggtgcctgtcctgagacccatggacctgatggtggaggccaccccacgaagagtatttgccaacgcacacacatatcacatcaactccatatctgtcaacagcgactatgaaacctacatgtccgctgatgacctgaggattaacctatggaactttgaaataaccaatcaaagttttaatattgtggacattaagccagccaacatggaggagctcacggaggtgatcacagcagccgagttccacccccatcattgcaacaccttcgtgtacagcagcagcaaagggacaatccggctgtgtgacatgcgggcatctgccctgtgtgacaggcacaccaaattttttgaagagccggaagatccaagcaacagatcatttttctctgaaattatctcttcgatttcggatgtgaagttcagccacagtgggaggtatatcatgaccagggactacttgaccgtcaaagtctgggatctcaacatggaaaaccgccccatcgagacttaccaggttcatgactacctccgcagcaagctgtgttccctctatgaaaatgactgcatttttgataaatttgagtgtgtgtggaatgggtcagacagtgtcatcatgacaggctcctacaacaacttcttcaggatgttcgacagaaacaccaagcgtgatgtgacccttgaggcttcgagggaaaacagcaagccccgggctatcctcaaaccccgaaaagtgtgtgtggggggcaagcggagaaaagacgagatcagtgtcgacagtctggactttagcaaaaagatcttgcatacagcttggcatccttcagaaaatattatagcagtggcggctacaaataacctatatatattccaggacaaggttaactaggtggacaagttattacttaataatctcacatactgaatactagtcaaacaagtttttaaatgtttctttgggtcttcatttgatgcattgactttaatttccctatacaggaaatgattggaatagaattaaaaggagtccaacattcccagctccccagttctaagaaacttttgtcaaacccaataggtttgggacacttctgtttagaattgaaagctgccagctaacagtaattcttccatagttgacttgaacttctgatgcttttattgcccagttttctctggtgggtccagtgttttgttcctaggtgtctgctgcgataaaatgaggttgtctgtagtatttaaggagaaaagagataagttttttttaattaagcaattccatttgattgaaaaaaatcaacaaaaaataaacaccgtttactcttagacaaattcttcttgttttgtgaaaaaccagaactagtcagtatctcctgcccctccaccatttttttttccattttccattttcctttgaacaatttcatttaagccagagatttattgcatgaagctgagaagaggatgcagaatgacaaggaaagggcacatcaaccctgctatgctctttttttgtaagctccatagaaacagcctgagaatttggctagggaacttgaatgcttcaggggacagaaagagagcactttcgacacagtgcttcccagagtgagcttggcagggccaggcggggccaaattccatctgctgccttgttactcttgctttttgtgctcttaaatggctccatataatcttctacttacatgttccttggcttttttctcttcaaccttttccagcttatttattccattgacttctaaaggccgagtcctgggtgcttattatctggtgttctaaatgaagcagtaagttggaagcagtgccaccacccctgagtccctgagaaaggctggtctgttctttttgggtgtttctcctaagcagcaccctcccctcctcctggttttggtaaccaaaagtaacaatccatcaacctccattgtacctagaacaaaaatagccaataaaaacgctgagttgtgaagtccaatcaggcacttctaactcaccccaagctcgccatctggaaaaacagaccagaaggctctcttctacagaaatgaactgtggggaaatcaagcagctgtgacatgaagtgaatgaagtccacttgaagctgtggaagatggttcatccttttccccagttgaggatccagatttataacttctagaaagccatttccagaaggttctatgtggcacacccctaggaaaggcactaaatgcatgcaaaggatttataaacttaggaaagtagatgggtggagtccagaaaactggttctgggttaatatctctacatctgtcttgatgactcatttctcctaactcccatttagtgcagggtaaatggtttgagatgagagtttttcaatgaaagggaaattttctttcagtttacagatgtattagaagtcctgactttcaagtgtaatttgctttggaggaggaaaaaatagtgaaagaatcattttatctcaattctaagctactatccatttactaatagctttttggcaaggaaataactgtcaccttaggtaaaaacagtcttgttagatgcagcccaatttcaggaacattaaaatgtaaaaaagtacgtctcagaattgagggagcatgggaacaaagacgagactttctcagtatttctcatttttcctgcaaggaaagcctcgccttaggcatctcaagtaaagtggctaaggtgtaaactctctgggcaagatttctgtcctgactgggacagtgttcttggaggagacatgagagagtcagaaacttctgccagtcatagagagtgatgattttgcagaaggccactgggttattggcctacatttaccaccgacttcctttatggccttttctccacttctccggactcagctcctctgtctgtaccacgtcgggggttgggaccaatcattgtatctcaaacttaagaatcaactcacatttgtactattactcatgtaacatttttttaagtcaccttttcttaaaagcaagacttagcctcctccaaagaaataatatgcatgaaatttcaactctgatatgctaggtttttccctaacattaatcacataattatcaatgtaacaaacatgcacccacataccacctgaaatcattttgtgaaccaccaggagcatgtgtatcaaactttgggaccctgagtaactgatatgacagaagatttatgcccttaggggcatcaaagatggtggttcttcacatattagagtcagcagggctgcccataacacacacaggaataatttttgtcatggtttaaggagttcataggcccctttgcagtttatctgcgaactccaaataaaagcccctacactagtccaacacccttagcatatagatgtacaaactgggatccagagtaggatgagtttgccagagaagaaagagcagagggcagccatcctctcctccatcccctgcaaaggatgcattagagcaaacacccaagactcctggacgggaacaggaggggaaagccctagagattaggcctcagggagcaataaccaccacgatgtttcacaaattaactgttctttaccaggtactgaactaggtattttacatgtgtgatctttcagccccagtactggcaatatttcttagttagtggcacatagaagtcagtctgttttcctgctgacactaaaaactacttgaaggctgatttgctaccttgcaacagttggttcgattctaagggccctatactactttaccccacaaggcctgctgcttggtaagagccatcagattacaactggagggtgtcagttgaatgaaggaaaatggaagccacgccatccctggcttttacaaaaaccatccttgcgcaacattcagttcctgacgttaaaaacaagtaatgcaaaaagctgaactttggtagacattcgtactcttctgtcaggaggaggaagattagttagaaaaaacaaaaaaggaagatactagccagcatcaagaagtgggatatataaaggcagatgggcagtgggaatcaagttgcttcttaactccttcaagtttggctcctgcctttactcttccattgaaaaaaaagcacctttaaacctctcattgatcttgtaattaattcaaccaaatcaacttctattaggcaaccagcatatataagatggaacaattgcaaggtggaataaagatgaagctaaaattctgctagctcagtggcccaatgaaataagtcagctatctccactaaacttcctttgaatattctagggtccattataataaaaggtacacactcaaatgcccaatttctaaggacttgaaaagccataatttccctcccttcaagcctacagagcaactgcctaaagcttccctccccagacaaccccaggcctcatttctttttcagtccctttgctagctgcctgcagggctcaagaaagccctggtaggcctcataatgaggatttagggatgacactatagtccacagcctgaatggtggaacccttactaattttccctcttccgtgatgaatgtgtggatgaagccggtgtgtttttaataatgccaccccacttccaaaacaaatcccctgacacagtctttggacataccaccctgaatgcacccgatctcatctgatcttggaagtgaaatggagtcaggcctggttagtctttggatgggggaagtctagacacaccactgagaaacattcacactgcaacctgattcactgtgcatccaacatgccttcatccacctcttccccctgaacttctaagtcaactctcagggactgctttccaagggagcaaccaacctggtcagtggaaaaaggatgagactgggagacaggaaacgtgggtcctgctcctggtaaccatggaacttaagctacccactcagtccctatgtcagtgtcatcacctgtaaaatggccagaaagacatctatcctagctcagagaattgttattgggagaacaagaaatccatttacttacaactattttgataggtttaaagcaccataaactaataatagcaacaacagtgatgggtaatatactattgctttccatgcctcatctcattatctcctctcccagaccccatggtggcattagtatttccattttgcaaatgagaaaatagactcaagttgtcaacctagccaagggcacaaagcccgagagagatggaaccaggactccaactcaaggtatctgactctaaagccagagctgttaaaatacagctctaacatacaatagttgctaacatttattgagcacttattataagccaggctttgttctacaaatttcacatgtattgacttatttacccctaaaactccagatgcagatactattgttgttctcattttatagatacagaaacagatgaatgacaaccaaatttacacagttcacaagtgacaaagccaggcagttttagttaaagttcttatccactatccccatcatacattatgtgtgtgtgtgtgtgtgtgtgtgtgtgtgtgtgtgtgtgtgtatgcatgtagatggaagttactgatcagaaaacaagccccagtaatgacccataagctcaatgaattaaagattcattggttgcctgggatgtgtcaggcagccaggttctagacaaggggctggagttactaagatatttaaaccactggcccctgccctccaagagatgacactcacataggagaaagtgcatatttgcatactgtaaacatttttacaatgagatatctatgaagggcagaagtcatacagaggaagaaatagttaatcaatgagtgataagaaaaggttctcagaatgtgtcatctaagcagaattttaactaaatttgctcaacaaagcatgatacagcgtttccaataggtagaccaacatataccagaatatgaagcaaaatccatatggcatggaaacagaaagccaatgtttctctccttccattagaaacacattttcgacatactagaactagcctacccctttttccttttgttcatccaataacaaatatttattaaaccttattttaagcactgtatttaagtgtaaagtagacggaaagaataaaaggaaaccaatatttcctgagtagttattgcaatgacaggcattgggagaggcactgttttaaatcattgttaatcacctgataggtagatgtattattccatttttatagcgagaaacagactcaaaagggttagatgacgtagcaggaagttttatctagatctatcctgttccagatcctatacttcttccatcacagttattggtaatgcagagttaccttggcttgattattttccctagcgtggatactcacaaacacgccatttctctgtgactaaatattgcctgacagctgaccaagaatacaaatttggtctgtcatcaaagcagagagtgaagtcaagtggctcacaggtctccaacttctgactttgaccttattatgactgattaactgtcccccaatttagatattccatgccccattggttaaactgctggtggcagaaccatcatgatctgccatctccgctgatccctgcctcagctgcaatcaaagcaatgatcactgtcaggccagaagaaggggcttagccactgccaagacagatcccagtccactcccagccttcccgcccctgctgctcattccccaaaaagtcaacctgggttttcctgggtgaacagtgcccactgaacagctcctgcttgcccatctcaagccctctcagttgccactccaatcattttggctgctgtatttggtttgagaaagagtggagaggacacttcttcataactcatatttgacagaaacccagaaattgtaggaacaagccatgattgctgtgattcttgctctggttggctagggatgccctcccttccagccagagtaatacatacttgtgggagtcatggaagactgaggaagctggagtagaagggaacaggggctttcctcagtggtaaaaggaaaagcaacattttggaactctaaacagttgctcagttgggcgaatttcatgcattcattcattcatttactaaatggttaatgattgttcatgtactgcctgccaagcccatgccagggtggtctgtggaagcagcagtgacagctccatcttcacacagctcacagatagcgggaggtgcagacaaactcacaggcaatggtggcagtggaatgtcaagagcccaggataccgagcctgccagcctgcctgcctgggttaaaatctgagctccaccatgtaaaagctgagcaacctagaaaaatgacaacctctctgtgcctcgattttctcattatgagataaggataaaaacgacatctatctcataaaattgctgtgaagattgcatgatttaatatgcacaaagctcttagaaggatgcctggcccacaaatatgcattcagtgcacatttcttgctacagttctgctaatcctataaaacatatgcactatgatggatgtgtctgggtgccaggaggacacaaaggagcactaactcatccagaccagaagcttcccagaggaggtgattcccaaggtgaaatccgaaagataaagggagtgagttatccaggagaagagaaaggaaaagcatattccagacatcaggataggacagtggaggcaaaacagcatatgctatatatatatggaattcacaacactctggtatgactgattagtaaaaagtaggaaggcagaccaagagaaataaggagacatggtaaggtgagtgggcaataatgcatgatctgaaaaataataatgcatggacttagtgtggttcacatatcaggagcttctccaatagccaggctatgaggcactaaaatgaggaaatatggtttccaaacttcgcaaatacttatagtccagccacaggggatatactgataaactcagctcaaatgtcacctcctcagagatgctttctcaaccacccttagttccatgaggactgcatcattgtttaggccactcctgtatccccagagcacagaacattgtctggctcatagtaggtgctcaaaagttttgttgaatgaatgaacaaataaacgtgtaaggaagtcaggcacagcacttgcccacaggaagcttataagatgagcggcatgccattgggagtttgaatgatatatggagatccaaacagggcatcagaggactgctcagaggagtcagggaattaagaaaaaattgggagccagtgagccaagatgtgttaaaagcaagtgatcaagcttagattgcagtgttagttaatagagcatatgtgtccctgcctgatgcattaccttccctgcagtagttagccttctgggaccctgaaaagcatgcagaaaggttgacagcttacaatcaataccatgttcactgatgcaggaagcaacattatcacatccaagatattgcccccacacccaggctgcagcactaaatattccccataacaaggcaaagggaagtgacaagagctattattctcaaccctcccacttggaaacaagaggtgagacaaaccttcccctagatgttcttagggaaaggcaagacccccaaagaaatctttcagagctgagcacatgcctaatacagcaagacagggatgggagaagattggcattttcatttgcctgggtgtccacaatattgcaggggaagctctgtgggcagctgggaaatacaacaataaattggagggggatgaacaatagggtcagtggggctgtgtgctgagtgaatgctggattttattctacatgcccaattcactccaataagataaacttgacttcctccagtgtggctttcttatttcagcttctctgactgtggcataattgaaagtcatatttcatctagaccattggttttcaactccaaatgcaggtggcttatgaagactcagcctgaatatataaagagaacagcaaacaatcatagttgcatattaaagacaatctatttctccgtaaaggaaagtaaagtgagtcatattacatacaagccacaatacagaactgatctgaaatacactgcggaatggcctttcagtctatgctggactctaacaggaaaaaggcagaaggtggtcaatggtgcatttatttaaacccctcatttcctccctgacgagaagaaggacaacagttcttatttttcatattatttttgaaaaggcagaaaggttaattatatattgacatgatttggatctgtgtcctcaccataatctcatgtcaaattgtaatccccagtgtttgaggtggggccaggtgggaggtgattggatcgtggaggtggatttctcatgcatggtttagcaccatcttcttggtgctattctcgtgatagtgagtaagttctcacgagatctggttgtttaaaggtgtgaagaacctcccctctgtctctcttgctcctgttcctgccatgtaagatatgctggctccccctttgccttctgccatgattgtaagtatccagaggcctctccagaagctgagcagatgtcagcaccatgcttcctgtacagcctgtggaaccatgagccaattaaacctcattcctttacaaattacccagtctcgggtttttctttatagcaatgcaagaacagactaatagaggtaatttgtgatgtttcttgatgaaagaatcagctgaaactcgagaattaatacattcattgaagatcagacaaatatcatagaaaccgagaaagtatccatcatggaacaagaaagttcagctcaaaaagctgattttttcaaagtacaaaatgaaataccatttcaggcatggatcatgactcaaagaagctcttcactttgaccagcacggggttgattcattaactccattgttctcaaatgaatcccacggtgtcccaagagaaactctggagaggcttcaccaagaacagtaattatagcttttccatgttatctagcattcaataaattcttcctaatgtga

SEQ ID NO: 827 - RNA, 1857 nt, Homo sapiens
  source 1..1857: mol_type = transcribed RNA
agtgaggtcgggcaggttcgctgtggcgggcgcctgggccgccggctgtttaacttcgcttccgctggcccatagtgatctttgcagtgacccagcatcactgtttcttggcgtgtgaagataacccaaggaattgaggaagttgctgagaagagtgtgctggagatgctctaggaaaaaattgaatagtgagacgagttccagcgcaagggtttctggtttgccaagaagaaagtgaacatcatggatcagaacaacagcctgccaccttacgctcagggcttggcctcccctcagggtgccatgactcccggaatccctatctttagtccaatgatgccttatggcactggactgaccccacagcctattcagaacaccaatagtctgtctattttggaagagcaacaaaggcagcagcagcaacaacaacagcagcagcagcagcagcagcagcaacagcaacagcagcagcagcagcagcagcagcagcagcagcagcagcagcagcagcagcagcagcaacaggcagtggcagctgcagccgttcagcagtcaacgtcccagcaggcaacacagggaacctcaggccaggcaccacagctcttccactcacagactctcacaactgcacccttgccgggcaccactccactgtatccctcccccatgactcccatgacccccatcactcctgccacgccagcttcggagagttctgggattgtaccgcagctgcaaaatattgtatccacagtgaatcttggttgtaaacttgacctaaagaccattgcacttcgtgcccgaaacgccgaatataatcccaagcggtttgctgcggtaatcatgaggataagagagccacgaaccacggcactgattttcagttctgggaaaatggtgtgcacaggagccaagagtgaagaacagtccagactggcagcaagaaaatatgctagagttgtacagaagttgggttttccagctaagttcttggacttcaagattcagaatatggtggggagctgtgatgtgaagtttcctataaggttagaaggccttgtgctcacccaccaacaatttagtagttatgagccagagttatttcctggtttaatctacagaatgatcaaacccagaattgttctccttatttttgtttctggaaaagttgtattaacaggtgctaaagtcagagcagaaatttatgaagcatttgaaaacatctaccctattctaaagggattcaggaagacgacgtaatggctctcatgtacccttgcctcccccacccccttctttttttttttttaaacaaatcagtttgttttggtacctttaaatggtggtgttgtgagaagatggatgttgagttgcagggtgtggcaccaggtgatgcccttctgtaagtgcccaccgcgggatgccgggaaggggcattatttgtgcactgagaacaccgcgcagcgtgactgtgagttgctcataccgtgctgctatctgggcagcgctgcccatttatttatatgtagattttaaacactgctgttgacaagttggtttgagggagaaaactttaagtgttaaagccacctctataattgattggactttttaattttaatgtttttccccatgaaccacagtttttatatttctaccagaaaagtaaaaatcttttttaaaagtgttgtttttctaatttataactcctaggggttatttctgtgccagacacattccacctctccagtattgcaggacagaatatatgtgttaatgaaaatgaatggctgtacatatttttttctttcttcagagtactctgtacaataaatgcagtttataaaagtgtta

SEQ ID NO: 828 - RNA, 10667 nt, Homo sapiens
  source 1..10667: mol_type = transcribed RNA
agcgccccctccgagatcccggggagccagcttgctgggagagcgggacggtccggagcaagcccagaggcagaggaggcgacagagggaaaaagggccgagctagccgctccagtgctgtacaggagccgaagggacgcaccacgccagccccagcccggctccagcgacagccaacgcctcttgcagcgcggcggcttcgaagccgccgcccggagctgccctttcctcttcggtgaagtttttaaaagctgctaaagactcggaggaagcaaggaaagtgcctggtaggactgacggctgcctttgtcctcctcctctccaccccgcctccccccaccctgccttccccccctcccccgtcttctctcccgcagctgcctcagtcggctactctcagccaacccccctcaccacccttctccccacccgcccccccgcccccgtcggcccagcgctgccagcccgagtttgcagagaggtaactccctttggctgcgagcgggcgagctagctgcacattgcaaagaaggctcttaggagccaggcgactggggagcggcttcagcactgcagccacgacccgcctggttaggctgcacgcggagagaaccctctgttttcccccactctctctccacctcctcctgccttccccaccccgagtgcggagccagagatcaaaagatgaaaaggcagtcaggtcttcagtagccaaaaaacaaaacaaacaaaaacaaaaaagccgaaataaaagaaaaagataataactcagttcttatttgcacctacttcagtggacactgaatttggaaggtggaggattttgtttttttcttttaagatctgggcatcttttgaatctacccttcaagtattaagagacagactgtgagcctagcagggcagatcttgtccaccgtgtgtcttcttctgcacgagactttgaggctgtcagagcgctttttgcgtggttgctcccgcaagtttccttctctggagcttcccgcaggtgggcagctagctgcagcgactaccgcatcatcacagcctgttgaactcttctgagcaagagaaggggaggcggggtaagggaagtaggtggaagattcagccaagctcaaggatggaagtgcagttagggctgggaagggtctaccctcggccgccgtccaagacctaccgaggagctttccagaatctgttccagagcgtgcgcgaagtgatccagaacccgggccccaggcacccagaggccgcgagcgcagcacctcccggcgccagtttgctgctgctgcagcagcagcagcagcagcagcagcagcagcagcagcagcagcagcagcagcagcagcagcagcagcaagagactagccccaggcagcagcagcagcagcagggtgaggatggttctccccaagcccatcgtagaggccccacaggctacctggtcctggatgaggaacagcaaccttcacagccgcagtcggccctggagtgccaccccgagagaggttgcgtcccagagcctggagccgccgtggccgccagcaaggggctgccgcagcagctgccagcacctccggacgaggatgactcagctgccccatccacgttgtccctgctgggccccactttccccggcttaagcagctgctccgctgaccttaaagacatcctgagcgaggccagcaccatgcaactccttcagcaacagcagcaggaagcagtatccgaaggcagcagcagcgggagagcgagggaggcctcgggggctcccacttcctccaaggacaattacttagggggcacttcgaccatttctgacaacgccaaggagttgtgtaaggcagtgtcggtgtccatgggcctgggtgtggaggcgttggagcatctgagtccaggggaacagcttcggggggattgcatgtacgccccacttttgggagttccacccgctgtgcgtcccactccttgtgccccattggccgaatgcaaaggttctctgctagacgacagcgcaggcaagagcactgaagatactgctgagtattcccctttcaagggaggttacaccaaagggctagaaggcgagagcctaggctgctctggcagcgctgcagcagggagctccgggacacttgaactgccgtctaccctgtctctctacaagtccggagcactggacgaggcagctgcgtaccagagtcgcgactactacaactttccactggctctggccggaccgccgccccctccgccgcctccccatccccacgctcgcatcaagctggagaacccgctggactacggcagcgcctgggcggctgcggcggcgcagtgccgctatggggacctggcgagcctgcatggcgcgggtgcagcgggacccggttctgggtcaccctcagccgccgcttcctcatcctggcacactctcttcacagccgaagaaggccagttgtatggaccgtgtggtggtggtgggggtggtggcggcggcggcggcggcggcggcggcggcggcggcggcggcggcggcggcgaggcgggagctgtagccccctacggctacactcggccccctcaggggctggcgggccaggaaagcgacttcaccgcacctgatgtgtggtaccctggcggcatggtgagcagagtgccctatcccagtcccacttgtgtcaaaagcgaaatgggcccctggatggatagctactccggaccttacggggacatgcgtttggagactgccagggaccatgttttgcccattgactattactttccaccccagaagacctgcctgatctgtggagatgaagcttctgggtgtcactatggagctctcacatgtggaagctgcaaggtcttcttcaaaagagccgctgaagggaaacagaagtacctgtgcgccagcagaaatgattgcactattgataaattccgaaggaaaaattgtccatcttgtcgtcttcggaaatgttatgaagcagggatgactctgggagcccggaagctgaagaaacttggtaatctgaaactacaggaggaaggagaggcttccagcaccaccagccccactgaggagacaacccagaagctgacagtgtcacacattgaaggctatgaatgtcagcccatctttctgaatgtcctggaagccattgagccaggtgtagtgtgtgctggacacgacaacaaccagcccgactcctttgcagccttgctctctagcctcaatgaactgggagagagacagcttgtacacgtggtcaagtgggccaaggccttgcctggcttccgcaacttacacgtggacgaccagatggctgtcattcagtactcctggatggggctcatggtgtttgccatgggctggcgatccttcaccaatgtcaactccaggatgctctacttcgcccctgatctggttttcaatgagtaccgcatgcacaagtcccggatgtacagccagtgtgtccgaatgaggcacctctctcaagagtttggatggctccaaatcaccccccaggaattcctgtgcatgaaagcactgctactcttcagcattattccagtggatgggctgaaaaatcaaaaattctttgatgaacttcgaatgaactacatcaaggaactcgatcgtatcattgcatgcaaaagaaaaaatcccacatcctgctcaagacgcttctaccagctcaccaagctcctggactccgtgcagcctattgcgagagagctgcatcagttcacttttgacctgctaatcaagtcacacatggtgagcgtggactttccggaaatgatggcagagatcatctctgtgcaagtgcccaagatcctttctgggaaagtcaagcccatctatttccacacccagtgaagcattggaaaccctatttccccaccccagctcatgccccctttcagatgtcttctgcctgttataactctgcactactcctctgcagtgccttggggaatttcctctattgatgtacagtctgtcatgaacatgttcctgaattctatttgctgggctttttttttctctttctctcctttctttttcttcttccctccctatctaaccctcccatggcaccttcagactttgcttcccattgtggctcctatctgtgttttgaatggtgttgtatgcctttaaatctgtgatgatcctcatatggcccagtgtcaagttgtgcttgtttacagcactactctgtgccagccacacaaacgtttacttatcttatgccacgggaagtttagagagctaagattatctggggaaatcaaaacaaaaacaagcaaacaaaaaaaaaaagcaaaaacaaaacaaaaaataagccaaaaaaccttgctagtgttttttcctcaaaaataaataaataaataaataaatacgtacatacatacacacatacatacaaacatatagaaatccccaaagaggccaatagtgacgagaaggtgaaaattgcaggcccatggggagttactgattttttcatctcctccctccacgggagactttattttctgccaatggctattgccattagagggcagagtgaccccagagctgagttgggcaggggggtggacagagaggagaggacaaggagggcaatggagcatcagtacctgcccacagccttggtccctgggggctagactgctcaactgtggagcaattcattatactgaaaatgtgcttgttgttgaaaatttgtctgcatgttaatgcctcacccccaaacccttttctctctcactctctgcctccaacttcagattgactttcaatagtttttctaagacctttgaactgaatgttctcttcagccaaaacttggcgacttccacagaaaagtctgaccactgagaagaaggagagcagagatttaaccctttgtaaggccccatttggatccaggtctgctttctcatgtgtgagtcagggaggagctggagccagaggagaagaaaatgatagcttggctgttctcctgcttaggacactgactgaatagttaaactctcactgccactaccttttccccacctttaaaagacctgaatgaagttttctgccaaactccgtgaagccacaagcaccttatgtcctcccttcagtgttttgtgggcctgaatttcatcacactgcatttcagccatggtcatcaagcctgtttgcttcttttgggcatgttcacagattctctgttaagagcccccaccaccaagaaggttagcaggccaacagctctgacatctatctgtagatgccagtagtcacaaagatttcttaccaactctcagatcgctggagcccttagacaaactggaaagaaggcatcaaagggatcaggcaagctgggcgtcttgcccttgtcccccagagatgataccctcccagcaagtggagaagttctcacttccttctttagagcagctaaaggggctacccagatcagggttgaagagaaaactcaattaccagggtgggaagaatgaaggcactagaaccagaaaccctgcaaatgctcttcttgtcacccagcatatccacctgcagaagtcatgagaagagagaaggaacaaagaggagactctgactactgaattaaaatcttcagcggcaaagcctaaagccagatggacaccatctggtgagtttactcatcatcctcctctgctgctgattctgggctctgacattgcccatactcactcagattccccacctttgttgctgcctcttagtcagagggaggccaaaccattgagactttctacagaaccatggcttctttcggaaaggtctggttggtgtggctccaatactttgccacccatgaactcagggtgtgccctgggacactggttttatatagtcttttggcacacctgtgttctgttgacttcgttcttcaagcccaagtgcaagggaaaatgtccacctactttctcatcttggcctctgcctccttacttagctcttaatctcatctgttgaactcaagaaatcaagggccagtcatcaagctgcccattttaattgattcactctgtttgttgagaggatagtttctgagtgacatgatatgatccacaagggtttccttccctgatttctgcattgatattaatagccaaacgaacttcaaaacagctttaaataacaagggagaggggaacctaagatgagtaatatgccaatccaagactgctggagaaaactaaagctgacaggttccctttttggggtgggatagacatgttctggttttctttattattacacaatctggctcatgtacaggatcacttttagctgttttaaacagaaaaaaatatccaccactcttttcagttacactaggttacattttaataggtcctttacatctgttttggaatgattttcatcttttgtgatacacagattgaattatatcattttcatatctctccttgtaaatactagaagctctcctttacatttctctatcaaatttttcatctttatgggtttcccaattgtgactcttgtcttcatgaatatatgtttttcatttgcaaaagccaaaaatcagtgaaacagcagtgtaattaaaagcaacaactggattactccaaatttccaaatgacaaaactagggaaaaatagcctacacaagcctttaggcctactctttctgtgcttgggtttgagtgaacaaaggagattttagcttggctctgttctcccatggatgaaaggaggaggattttttttttcttttggccattgatgttctagccaatgtaattgacagaagtctcattttgcatgcgctctgctctacaaacagagttggtatggttggtatactgtactcacctgtgagggactggccactcagacccacttagctggtgagctagaagatgaggatcactcactggaaaagtcacaaggaccatctccaaacaagttggcagtgctcgatgtggacgaagagtgaggaagagaaaaagaaggagcaccagggagaaggctccgtctgtgctgggcagcagacagctgccaggatcacgaactctgtagtcaaagaaaagagtcgtgtggcagtttcagctctcgttcattgggcagctcgcctaggcccagcctctgagctgacatgggagttgttggattctttgtttcatagctttttctatgccataggcaatattgttgttcttggaaagtttattatttttttaactcccttactctgagaaagggatattttgaaggactgtcatatatctttgaaaaaagaaaatctgtaatacatatatttttatgtatgttcactggcactaaaaaatatagagagcttcattctgtcctttgggtagttgctgaggtaattgtccaggttgaaaaataatgtgctgatgctagagtccctctctgtccatactctacttctaaatacatataggcatacatagcaagttttatttgacttgtactttaagagaaaatatgtccaccatccacatgatgcacaaatgagctaacattgagcttcaagtagcttctaagtgtttgtttcattaggcacagcacagatgtggcctttccccccttctctcccttgatatctggcagggcataaaggcccaggccacttcctctgccccttcccagccctgcaccaaagctgcatttcaggagactctctccagacagcccagtaactacccgagcatggcccctgcatagccctggaaaaataagaggctgactgtctacgaattatcttgtgccagttgcccaggtgagagggcactgggccaagggagtggttttcatgtttgacccactacaaggggtcatgggaatcaggaatgccaaagcaccagatcaaatccaaaacttaaagtcaaaataagccattcagcatgttcagtttcttggaaaaggaagtttctacccctgatgcctttgtaggcagatctgttctcaccattaatctttttgaaaatcttttaaagcagtttttaaaaagagagatgaaagcatcacattatataaccaaagattacattgtacctgctaagataccaaaattcataagggcagggggggagcaagcattagtgcctctttgataagctgtccaaagacagactaaaggactctgctggtgactgacttataagagctttgtgggtttttttttccctaataatatacatgtttagaagaattgaaaataatttcgggaaaatgggattatgggtccttcactaagtgattttataagcagaactggctttccttttctctagtagttgctgagcaaattgttgaagctccatcattgcatggttggaaatggagctgttcttagccactgtgtttgctagtgcccatgttagcttatctgaagatgtgaaacccttgctgataagggagcatttaaagtactagattttgcactagagggacagcaggcagaaatccttatttctgcccactttggatggcacaaaaagttatctgcagttgaaggcagaaagttgaaatacattgtaaatgaatatttgtatccatgtttcaaaattgaaatatatatatatatatatatatatatatatatatatatatagtgtgtgtgtgtgttctgatagctttaactttctctgcatctttatatttggttccagatcacacctgatgccatgtacttgtgagagaggatgcagttttgttttggaagctctctcagaacaaacaagacacctggattgatcagttaactaaaagttttctcccctattgggtttgacccacaggtcctgtgaaggagcagagggataaaaagagtagaggacatgatacattgtactttactagttcaagacagatgaatgtggaaagcataaaaactcaatggaactgactgagatttaccacagggaaggcccaaacttggggccaaaagcctacccaagtgattgaccagtggccccctaatgggacctgagctgttggaagaagagaactgttccttggtcttcaccatccttgtgagagaagggcagtttcctgcattggaacctggagcaagcgctctatctttcacacaaattccctcacctgagattgaggtgctcttgttactgggtgtctgtgtgctgtaattctggttttggatatgttctgtaaagattttgacaaatgaaaatgtgtttttctctgttaaaacttgtcagagtactagaagttgtatctctgtaggtgcaggtccatttctgcccacaggtagggtgtttttctttgattaagagattgacacttctgttgcctaggacctcccaactcaaccatttctaggtgaaggcagaaaaatccacattagttactcctcttcagacatttcagctgagataacaaatcttttggaattttttcacccatagaaagagtggtagatatttgaatttagcaggtggagtttcatagtaaaaacagcttttgactcagctttgatttatcctcatttgatttggccagaaagtaggtaatatgcattgattggcttctgattccaattcagtatagcaaggtgctaggttttttcctttccccacctgtctcttagcctggggaattaaatgagaagccttagaatgggtggcccttgtgacctgaaacacttcccacataagctacttaacaagattgtcatggagctgcagattccattgcccaccaaagactagaacacacacatatccatacaccaaaggaaagacaattctgaaatgctgtttctctggtggttccctctctggctgctgcctcacagtatgggaacctgtactctgcagaggtgacaggccagatttgcattatctcacaaccttagcccttggtgctaactgtcctacagtgaagtgcctggggggttgtcctatcccataagccacttggatgctgacagcagccaccatcagaatgacccacgcaaaaaaaagaaaaaaaaaattaaaaagtcccctcacaacccagtgacacctttctgctttcctctagactggaacattgattagggagtgcctcagacatgacattcttgtgctgtccttggaattaatctggcagcaggagggagcagactatgtaaacagagataaaaattaattttcaatattgaaggaaaaaagaaataagaagagagagagaaagaaagcatcacacaaagattttcttaaaagaaacaattttgcttgaaatctctttagatggggctcatttctcacggtggcacttggcctccactgggcagcaggaccagctccaagcgctagtgttctgttctctttttgtaatcttggaatcttttgttgctctaaatacaattaaaaatggcagaaacttgtttgttggactacatgtgtgactttgggtctgtctctgcctctgctttcagaaatgtcatccattgtgtaaaatattggcttactggtctgccagctaaaacttggccacatcccctgttatggctgcaggatcgagttattgttaacaaagagacccaagaaaagctgctaatgtcctcttatcattgttgttaatttgttaaaacataaagaaatctaaaatttca

SEQ ID NO: 829 - RNA, 4355 nt, Homo sapiens
  source 1..4355: mol_type = transcribed RNA
gcaggacgccatactggacgccaagtgggaggaacttcaaggctgtcccctgcgggcctcccgctctgcttctgcgaaggtttcattgaaaacagatcctgcaaaagttccaggtgcccacactggaaacttggagatcctgcttcccagaccacagctgtggggaacttggggtggagcagagaagtttctgtattcagctgcccaggcagaggagaatggggtctccacagcctgaagaatgaagacacgacagaataaagactcgatgtcaatgaggagtggacggaagaaagaggcccctgggccccgggaagaactgagatcgaggggccgggcctcccctggaggggtcagcacgtccagcagtgatggcaaagctgagaagtccaggcagacagccaagaaggcccgagtagaggaagcctccaccccaaaggtcaacaagcagggtcggagtgaggagatctcagagagtgaaagtgaggagaccaatgcaccaaaaaagaccaaaactgagcaggaactccctcggccacagtctccctccgatctggatagcttggacgggcggagccttaatgatgatggcagcagcgaccctagggatatcgaccaggacaaccgaagcacgtcccccagtatctacagccctggaagtgtggagaatgactctgactcatcttctggcctgtcccagggcccagcccgcccctaccacccacctccactctttcctccttcccctcaaccgccagacagcacccctcgacagccagaggctagctttgaaccccatccttctgtgacacccactggatatcatgctcccatggagccccccacatctcgaatgttccaggctcctcctggggcccctccccctcacccacagctctatcctgggggcactggtggagttttgtctggacccccaatgggtcccaaggggggaggggctgcctcatcagtggggggccctaatgggggtaagcagcaccccccacccactactcccatttcagtatcaagctctggggctagtggtgctcccccaacaaagccgcctaccactccagtgggtggtgggaacctaccttctgctccaccaccagccaacttcccccatgtgacaccgaacctgcctcccccacctgccctgagacccctcaacaatgcatcagcctctccccctggcctgggggcccaaccactacctggtcatctgccctctccccacgccatgggacagggtatgggtggacttcctcctggcccagagaagggcccaactctggctccttcaccccactctctgcctcctgcttcctcttctgctccagcgccccccatgaggtttccttattcatcctctagtagtagctctgcagcagcctcctcttccagttcttcctcctcttcctctgcctcccccttcccagcttcccaggcattgcccagctacccccactctttccctcccccaacaagcctctctgtctccaatcagccccccaagtatactcagccttctctcccatcccaggctgtgtggagccagggtcccccaccacctcctccctatggccgcctcttagccaacagcaatgcccatccaggccccttccctccctctactggggcccagtccaccgcccacccaccagtctcaacacatcaccatcaccaccagcaacagcaacagcagcagcagcagcagcagcagcagcagcagcagcagcagcagcatcacggaaactctgggccccctcctcctggagcatttccccacccactggagggcggtagctcccaccacgcacacccttacgccatgtctccctccctggggtctctgaggccctacccaccagggccagcacacctgcccccacctcacagccaggtgtcctacagccaagcaggccccaatggccctccagtctcttcctcttccaactcttcctcttccacttctcaagggtcctacccatgttcacacccctccccttcccagggccctcaaggggcgccctaccctttcccaccggtgcctacggtcaccacctcttcggctaccctttccacggtcattgccaccgtggcttcctcgccagcaggctacaaaacggcctccccacctgggcccccaccgtacggaaagagagccccgtccccgggggcctacaagacagccaccccacccggatacaaacccgggtcgcctccctccttccgaacggggaccccaccgggctatcgaggaacctcgccacctgcaggcccagggaccttcaagccgggctcgcccaccgtgggacctgggcccctgccacctgcggggccctcaggcctgccatcgctgccaccaccacctgcggcccctgcctcagggccgcccctgagcgccacgcagatcaaacaggagccggctgaggagtatgagacccccgagagcccggtgcccccagcccgcagcccctcgccccctcccaaggtggtagatgtacccagccatgccagtcagtctgccaggttcaacaaacacctggatcgcggcttcaactcgtgcgcgcgcagcgacctgtacttcgtgccactggagggctccaagctggccaagaagcgggccgacctggtggagaaggtgcggcgcgaggccgagcagcgcgcgcgcgaagaaaaggagcgcgagcgcgagcgggaacgcgagaaagagcgcgagcgcgagaaggagcgcgagcttgaacgcagcgtgaagttggctcaggagggccgtgctccggtggaatgcccatctctgggcccagtgccccatcgccctccatttgaaccgggcagtgcggtggctacagtgcccccctacctgggtcctgacactccagccttgcgcactctcagtgaatatgcccggcctcatgtcatgtctcctggcaatcgcaaccatccattctacgtgcccctgggggcagtggacccggggctcctgggttacaatgtcccggccctgtacagcagtgatccagctgcccgggagagggaacgggaagcccgtgaacgagacctccgtgaccgcctcaagcctggctttgaggtgaagcctagtgagctggaacccctacatggggtccctgggccgggcttggatccctttccccgacatgggggcctggctctgcagcctggcccacctggcctgcaccctttcccctttcatccgagcctggggcccctggagcgagaacgtctagcgctggcagctgggccagccctgcggcctgacatgtcctatgctgagcggctggcagctgagaggcagcacgcagaaagggtggcggccctgggcaatgacccactggcccggctgcagatgctcaatgtgactccccatcaccaccagcactcccacatccactcgcacctgcacctgcaccagcaagatgctatccatgcagcctctgcctcggtgcaccctctcattgaccccctggcctcagggtctcaccttacccggatcccctacccagctggaactctccctaaccccctgcttcctcaccctctgcacgagaacgaagttcttcgtcaccagctctttgctgccccttaccgggacctgccggcctccctttctgccccgatgtcagcagctcatcagctgcaggccatgcacgcacagtcagctgagctgcagcgcttggcgctggaacagcagcagtggctgcatgcccatcacccgctgcacagtgtgccgctgcctgcccaggaggactactacagtcacctgaagaaggaaagcgacaagccactgtagaacctgcgatcaagagagcaccatggctcctacattggaccttggagcacccccaccctccccccaccgtgcccttggcctgccacccagagccaagagggtgctgctcagttgcagggcctccgcagctggacagagagtgggggagggagggacagacagaaggccaaggcccgatgtggtgtgcagaggtggggaggtggcgaggatggggacagaaagcgcacagaatcttggaccaggtctctcttccttgtcccccctgcttttctcctcccccatgcccaacccctgtggccgccgcccctcccctgccccgttggtgtgattatttcatctgttagatgtggctgttttgcgtagcatcgtgtgccacccctgcccctccccgatccctgtgtgcgcgccccctctgcaatgtatgccccttgccccttccccacactaataatttatatatataaatatctatatgacgctcttaaaaaaacatcccaaccaaaaccaaccaaacaaaaacatcctcacaactccccaggaa

SEQ ID NO: 830 - RNA, 6724 nt, Homo sapiens
  source 1..6724: mol_type = transcribed RNA
aatcatcttctttaccctggagctgctgctgctgctgctgcttttgcttttggggctgagtttaataagcgagcgagcgagcaagcgagcgcggggggaaaaaggcagagaatgtccgccatctaccctccgctcctgggcgcgctctcattcatagcagcctcttcatgaattacagctgagggggggcggaggaggggggggtaccacacaacaccccagcaaacctccgggcccccaggcatggctagctcgtgtgccgtgcaggtgaagctggagctggggcaccgcgcccaggtgaggaaaaaacccaccgtggagggcttcacccacgactggatggtgttcgtacgcggtccggagcacagtaacatacagcactttgtggagaaagtcgtcttccacttgcacgaaagctttcctaggccaaaaagagtgtgcaaagatccaccttacaaagtagaagaatctgggtatgctggtttcattttgccaattgaagtttattttaaaaacaaggaagaacctaggaaagtccgctttgattatgacttattcctgcatcttgaaggccatccaccagtgaatcacctccgctgtgaaaagctaactttcaacaaccccacagaggactttaggagaaagttgctgaaggcaggaggggaccctaataggagtattcataccagcagcagcagcagcagcagcagtagcagcagcagcagcagcagcagcagcagcagtagcagcagcagcagcagcagcagcagcagcagtagcagcagcagtagcagcagcagcagcagcagtagtaccagtttttcaaagcctcacaaattaatgaaggagcacaaggaaaaaccttctaaagactccagagaacataaaagtgccttcaaagaaccttccagggatcacaacaaatcttccaaagaatcctctaagaaacccaaagaaaataaaccactgaaagaagagaaaatagttcctaagatggccttcaaggaacctaaacccatgtcaaaagagccaaaaccagatagtaacttactcaccatcaccagtggacaagataagaaggctcctagtaaaaggccgcccatttcagattctgaagaactctcagccaaaaaaaggaaaaagagtagctcagaggctttatttaaaagtttttctagcgcaccaccactgatactcacttgttctgctgacaaaaaacagataaaagataaatctcatgtcaagatgggaaaggtcaaaattgaaagtgagacatcagagaagaagaaatcaacgttaccgccatttgatgatattgtggatcccaatgattcagatgtggaggagaatatatcctctaaatctgattctgaacaacccagtcctgccagctccagctccagctccagctccagcttcacaccatcccagaccaggcaacaaggtcctttgaggtctataatgaaagatctgcattctgatgacaatgaggaggaatcagatgaagtggaggataacgacaatgactctgaaatggagaggcctgtaaatagaggaggcagccgaagtcgcagagttagcttaagtgatggcagcgatagtgaaagcagttctgcttcttcacccctacatcacgaacctccaccacccttactaaaaaccaacaacaaccagattcttgaagtgaaaagtccaataaagcaaagcaaatcagataagcaaataaagaatggtgaatgtgacaaggcatacctagatgaactggtagagcttcacagaaggttaatgacattgagagaaagacacattctgcagcagatcgtgaaccttatagaagaaactggacactttcatatcacaaacacaacatttgattttgatctttgctcgctggacaaaaccacagtccgtaaactacagagttacctggaaacatctggaacatcctgaggatataacaactggatgcatcaagaactattgtgttttttttttttggttttttttttttttggttgtgattttttgttcttgttgtttatatgaaaacactcaaaatgatgcaaccaaaagggaaaaaataaaaatcaaacaaccttcagctttatttttctttaaagccagtcatcatctcttgataaaggagaggttaaagcaaaccagcctcagcggaccactcttctctccaaggaaatccccgggaagagttagcctggatagccttgaaaacaaacaaatcaaacacaacacaagaaaactcaaagaatgtgtatggtatcatgtatctctctgtggtggttcattccacaggacgaatgcatattcaacacactgccttattacataactgatctatttattatcgcatacagatattctaagtcgttgagggaatgacaccatcagacattataagtacttggtcccgtggatgctctttcaatgcagcacccttgccatcccaagcccagtgaccttactcgtataccgtgccactttccaccaactttttccaagtcctttaactcgttgcagtctgtattttccaccttttgtttttccagttccaggacacagattatcaactggggggaccaaatagccaccttgattttcttctttgtggtctttttcctgaaagttggggcccagtccttggctgtatccatgtaatgatcttggaccatggtagaaaatgcaccaaataggatcatatgaattgctgtctagccttagtcaataaacttgtaggacttttaaacaaaagtgtacctgtaaatgtcctgaatccagcattgttgagctgtcatcaacattcttgtgtctgttttactgttacaatattaggtgaatatggaagtaaaggcattccacaggatcatcatttaaaaaaaaagaattctggtcctgttttctaaaaaaaaaaactgttgtagaaattcttaatttggatctatttattagtcagagtttcagctttcttcagctgccagtgtgttactcatctttatcctaaaaatctggaatcagagatttttgtttgttcacatatgattctcttagacacttttatatttgaaaaaattaaaatctttctttggggaaaaattcttggttattctgccataacagattatgtattaacttgtagattcagtggttcaatacctgtttagttgcttgctaatatttccagaaggatttcttgtattggtgaaagacggttggggatggggggatttttttgttcttgttgtacccttgttttgaaactagaaatctgtcctgtggcatgcaaaagaaagcaaattatttttaaaagaaaaaaaccaaagtacttttggtgtcattattccatcttctccataagtggagaaatgaaaagtaagaacagctcatcttcaaagtttttactagaaattcagccgaaaagaagagaaatgaagaaatacttctggatccaaaggttcgtcactggatcagccttaagaaagtctctatgtgtgctaatagaccagtatctcccttgtttgttcccatgccagatgctgtcttttcatacagagattaactagtgtctgtacagaaaatggtctttccagacccattcttttgggcagttatataaatgcagattgataatggagttatttctgcattttaaaaaggggattttttacactgtttctttctatccaaagaaactatttttcctttaaaaaattataatacagccatgctccttgtaaattatttctctgaagcgtcctcccagaggacaagtgtactttctcaataatgttatgattcttaatgacgattggcatgaaccgtacttgaagcatttgttgtattgtccacttcttgatgtgcagagaaactttgagtcattttggacattaggtgattgatgaattgtgtggtttcagttgcgttttgtttttaactttatagctggaaggggagggtaatgtttatatggaaatgttgcaaatttttaaaatattttaaaatttctaactgctaacacatattctgatcaagccagaagtttatgtgatttaatatatctgtgtagtttaactagaaacgtatatatgtagtttgggccatttttatttctgtaactaaattgtggggcaaaaaatatgatttgccaatgtaaaaattttttcctttaagttactaaccaagaagctaggtaagataagaaatgaccaaacaaaaataatgataagaaggacagctattatatgataaactttagacttgaaaattaggtaataaagttaatttcttcagaatatcctaaaatgtaagtttgtaaattgataaagttcagaaaaacttatccatcttctactcatcaagatagcaaagtaagtttttcacaaaattaagactgagagttacgttattttttttgaagtggtaatcttgctctcatctaatttttaaatacagaaataaaaagatccctttgaattaatttcaagtagttttaatacctctcttaaagtaaccccttcagttctgtcacatttatatacacccaactttgaagcctattaagaatatctttgacatgtgagtaccctaacagtggctctggtttcttaagcacaaagggaaaatggcagggtttaatttctttggtgtacatatataaatagatgtttcaaataaaattaattgggtaaatgtgaatatggtttgaaccagccagagtatgataaacttttaaaaaatttttcctcagtgatcagccaggggaaaaaatatatgtacagagctcctgcccctctgcccccttataacttagcttttgcctctggttttgcagcaggatgtgtgttggtgggtttggggttccttctgtcttcggatgtaacagtcatgttagcaacaatattttgcagttacttcaccatcctcagcataatctgcctctctctcaatcttaatacagacaaataggtatgtctataaatgcgttcatatagtgtcaaggtagggaagactataaaaacttcagatcaggaaaaaaatatctcttaagagagtgtcttaaacattttaaattgctaggcaatttaaatctctctaatctgaatattcaccttttggtggaaagagccagtaatattggttttcttccactaaaaagtttcttcaaaatttttttttttttttttttttttttttttttgccgatatcttttacaggcccacctaatctttaaaaaaaagagaagaaacaattttaggcctgtataacatcctatttactacttcaagctccacaaatgtagttaatatatttgtttaagagagactttactcttaaatgttttaactttgcctacttaatggagttggatgtccagtgttggaaacagtcagtgtctgtttggtggctcgtgtttatttttgtcactgtagaagtgatctgctctggagtaatttgctgtatgcttattactttccacctttagcgttttgtgtactaatgctatgtactgctcctatatttatatatacatatatatatatatatacacatatatattatcagagtaatcttgctttggactgttgctctaaaactatgaatatgatgtagagactactacagctgcagtgaatgttaaggagtcaattcccatggtttagtttagtctcgggctggaagtctacatcttttgacctcttttgttttatatgatgctttttattatgtaggcactgccatccctgaatattccttgtaaagatgcagtgaagaagtcaatttaaaaggaagacaaagccaccgctgtctgtaaactgtaaatgtgtattttggcacttgtactccagtattctgaaaatagagttatgatggaaatgctgacagatccttaatggtggccagagctaccatgcagtgcaaaaataaattaagtgaaaatgtattattgagattaacagtgcaaggccaatacattttataaatctgtcagtatctttttaatggactgtgtatgtgtagttatgttgaaagatacattgtgtatgtgtacatgcttttgtgtgaattcaaggcacactgtaagatgtatttcccttctctaaaatccatgttgaaatgtaagtacagattgatagaaataggtgttttacttaaactcatataatctgtttcagcaccttttttaaaatgtataattgtactgatttgctgagagtcatttgaccaaagtttggctttattttgcatacaggaaaaattagcccctagccttttctcaagaagtgatgctgtttctaaagaagaatagatggggagatctgagacatccagagagaggacaatgtgtccaaaaccagctgaaggcagagagtccatgcctcattcattttaggagtccctcatgtctaacaccatcttctgtgtcctaaagccagtatatatataatatttttaaaactctgcaaagattggaacaagaagtggtgggatacattttttggcataaactgggctatgtgtgcccggtattttttctttcccccctatttctttggagggttttgttcagaaacaatgtgctatagccagagagagtcgatcttacaaagtccctgcatttactttcacagcaagaactgctaccttgattagacaggaaggagaacaactactacaacaaagagaataaaatacattcagtttggtaaataa

SEQ ID NO: 831 - RNA, 8012 nt, Homo sapiens
  source 1..8012: mol_type = transcribed RNA
agctgcagcggagccgcggagcgggcggcggggcccaggctgtgcgcttggggagcgcggaatgtgaggcttggcgggccgcagcacgctcggacgggccaggggcggcgacccctcgcggacgcccggctgcgcgccgggccggggacttgcccttgcacgctccctgcgccctccagctcgccggcgggaccatgaagaagttctctcggatgcccaagtcggagggcggcagcggcggcggagcggcgggtggcggggctggcggggccggggccggggccggctgcggctccggcggctcgtccgtgggggtccgggtgttcgcggtcggccgccaccaggtcaccctggaagagtcgctggccgaaggtggattctccacagttttcctcgtgcgtactcacggtggaatccgatgtgcattgaagcgaatgtatgtcaataacatgccagacctcaatgtttgtaaaagggaaattacaattatgaaagagctatctggtcacaaaaatattgtgggctatttggactgtgctgttaattcaattagtgataatgtatgggaagtccttatcttaatggaatattgtcgagctggacaggtagtgaatcaaatgaataagaagctacagacgggttttacagaaccagaagtgttacagatattctgtgatacctgtgaagctgttgcaaggttgcatcagtgtaagactccaataattcaccgggatctgaaggtagaaaatattttgttgaatgatggtgggaactatgtactttgtgactttggcagtgccactaataaatttcttaatcctcaaaaagatggagttaatgtagtagaagaagaaattaaaaagtatacaactctgtcatacagagcccctgaaatgatcaacctttatggagggaaacccatcaccaccaaggctgatatctgggcactgggatgtctactctataaactttgtttcttcactcttccttttggtgagagtcaggttgctatctgtgatggcaacttcaccatcccagacaattctcgttactcccgtaacatacattgcttaataaggttcatgcttgaaccagatccggaacatagacctgatatatttcaagtgtcatattttgcatttaaatttgccaaaaaggattgtccagtctccaacatcaataattcttctattccttcagctcttcctgaaccgatgactgctagtgaagcagctgctaggaaaagccaaataaaagccagaataacagataccattggaccaacagaaacctcaattgcaccaagacaaagaccaaaggccaactctgctactactgccactcccagtgtgctgaccattcaaagttcagcaacacctgttaaagtccttgctcctggtgaattcggtaaccatagaccaaaaggggcactaagacctggaaatggccctgaaattttattgggtcagggacctcctcagcagccgccacagcagcatagagtactccagcaactacagcagggagattggagattacagcaactccatttacagcatcgtcatcctcaccagcagcagcagcagcagcagcagcaacagcaacagcagcagcagcaacagcaacagcagcagcagcagcagcagcagcagcaccaccaccaccaccaccaccacctacttcaagatgcttatatgcagcagtatcaacatgcaacacagcagcaacagatgcttcaacaacaatttttaatgcattcggtatatcaaccacaaccttctgcatcacagtatcctacaatgatgccgcagtatcagcaggctttctttcaacagcagatgctagctcaacatcagccgtctcaacaacaggcatcacctgaatatcttacctcccctcaagagttctcaccagccttagtttcctacacttcatcacttccagctcaggttggaaccataatggactcctcctatagtgccaataggtcagttgctgataaagaggccattgcaaatttcacaaatcagaagaacatcagcaatccacctgatatgtcagggtggaatccttttggagaggataatttctctaagttaacagaagaggaactattggacagagaatttgaccttctaagatcaaataggctcgaggagagagcatcctcagataagaatgtagactcactttctgctccacataaccatcctccagaagatccttttggttctgttcctttcatttctcattcaggttctcctgaaaagaaagctgaacattcatctataaatcaagaaaatggcactgcaaaccctatcaagaacggtaaaacaagtccagcatctaaagatcagcggactggaaagaaaacctcagtacagggtcaagtgcaaaaggggaatgatgaatctgaaagtgattttgaatcagatcccccttctcctaagagcagtgaagaggaagagcaagatgatgaagaagttcttcagggggaacaaggagattttaatgatgatgatactgaaccagaaaatctgggtcataggcctctcctcatggattctgaagatgaggaagaagaggagaaacatagctctgattctgattatgagcaggctaaagcaaagtacagtgacatgagctctgtctacagagacagatctggcagtggaccaacccaagatcttaatacaatactcctcacctcagcccaattatcctctgatgttgcagtggagactcccaaacaggagtttgatgtatttggcgctgtccccttctttgcagtgcgtgctcaacagccccagcaagaaaagaatgaaaagaacctccctcaacacaggtttcctgctgcaggactggagcaggaggaatttgatgtattcacaaaggcgccttttagcaagaaggtgaatgtacaagaatgccatgcagtggggcctgaggcacatactatccctggttatcccaaaagtgtagatgtatttggctccactccatttcagcccttcctcacatcaacaagtaaaagtgaaagcaatgaggacctttttgggcttgtgccctttgatgaaataacggggagccagcagcaaaaagtcaaacagcgcagcttacagaaactgtcctctcgccaaaggcgcacaaagcaggatatgtccaaaagtaatgggaagcggcatcatggcacgccaactagcacaaagaagactttgaagcctacctatcgcactccagagagggctcgcaggcacaaaaaagtgggccgccgagactctcaaagtagcaatgaatttttaaccatctcagactccaaggagaacattagtgttgcactgactgatgggaaagatagggggaatgtcttacaacctgaggagagcctgttggaccccttcggtgccaagcccttccattctccagacctgtcatggcaccctccacatcagggcctgagcgacatccgtgctgatcacaatactgtcctgccagggcggccaagacaaaattcactacatgggtcattccatagtgcagatgtattgaaaatggatgattttggtgccgtgccctttacagaacttgtggtgcaaagcatcactccacatcagtcccaacagtcccaaccagtcgaattagacccatttggtgctgctccatttccttctaaacagtagatacttctgatggattctcggcattaactcctgtttcaaaaaagtgtgaacagttttatgaatttgaaagaaaatttggtagctctttatagcattcattcttaaagatcagtcagaataggtgatttctaaataaaccaaatagaagaatgaagtatctctacagggtagtaacttgattcctcttcaggagaaaagggagctaaattgcaagctctaactaagggtttctgctactgacatcacaacacagaaatgcaagtgtggtacttccagtgaaagcacatggcacctttctaggtgtgtagccactgagaagggacagtgaaactgttatttttgatatcagaatgtcatttttatgtgcatatccctaaaattagggttatttctacatacactagttacacttgtgaattttttttaaggtctcttttaatttccagacagttaaaaacaatctagttatcttaaagcattagaaagttattatctggagagtgcagagatttcagtccatacacctttctccacaaagcagagccagaagtaactgactattgtgcctaaaactctgtttcatttttaaaaacaagtgccattaaaatggaatatctaatgataagcatatgaaataatgtgtaattagctcaatttaactattccacaacttacatattccaaaacaatgttatacatgataaatatatataatttttgtcagttaaaacaaattaaaaaaatggactatcgtcgcacagaagcctagaacaaaaatatgaagagaaatatctgacatttgtaaagaaattataagaagaaaaaaagatacagaacagaaaacattcactactttagaaacactttatgcatggcttcttgccccaaacttttattgtgatggccctaataaagcagattattggaaaaattggaggacaagggttgtataaaaattttattttatgaagaaaatatgtagcggaaactgaattttcaagacatttacaatgtgaaatcatgttgcatttaacaatgtactttattagcaacttcaccaaatattccccaagtcataagcaacaattatttttattaggttttggggggtggagtagttttaataaagtgcacagaatggtgacacccacaaagccttatataaaggcaggattcatgcatcctgctgcaagtacctctgcactaatataccagatcctaaaatgcatataaggtggactagcatcttaattctgctagttgattgtgtctttactgaaaagaacccagctaccaatttgcctttttttacaccacaaatcctaattagaaacttgaggttttatagaaatcatttaatgatagagattacatatgtgaattaatgtgaatatagtatctgtgcttcctgtgtctatgactattttaagatataattgtgctgcgctatcagattaacatttggaagtttctagaacagttaatgctatttacagaaaggagtagaaactcatcaactggcactctctttgatttttatattttaaattaactctcttcgatctcaaagtatattttacgagtaattttattaggaatctcttatagtgccccaatgggataagctatttgcctattttcacagttctgaacttggaaagaagcaaagtatatgtaactaaaccacatatttgtctttttattgctttttcccttcttttatatgctaaatcaaatatagatttgtggatagggaagcaatatgtgaatcacaatgtagcagaggcagaccaagcattacattattatttagagctggactgcaccaattacttgtcctcgtgccaaaggcaaatatgtttgcacctttttttttttttctgattctcaggttgattaatactgctaatgcaaatgctcaagtagatgtttaaaaactttacaaaatagattcaagtgatactttcttttaaaagtgaagagttgatgattacacatagtaaattcatgaactacagtaggtttgtatcaaacaattttttttaatgaaaatctgttgaggtgtacacaatatgcttcttgattgtattagtccttggtctctgctagacctcatgagtttcatcatttagaaaaggggtagaggatgaactaatgtctccttcagatgtaaacatgaaatacctagagttttacttgcttttcaatacactgaataattttaaatgattctgacactgatgtagaccctttgacttataaattctgaggaaacaactgacagcataaaatatttacattcttataacacagcacagtgactttcttctttcaagattgtagctcagagaaaagatacaggattcaattgggggttcaataggatagaaatggagagattcctttgtgttgtagtagaggcattttcctaaggagtatagatttatactttgcattttcattcatcatcccccagaatcatggtcaaggtgtaggtcactccacacagctgatgctcaggttattcccttgtgagaattatgagaataaagctcccaagatatgtgaaagtgcttaacacagtacctggcacacagcactcaataaaagtttggctctattatgggatggttcaattctggtttaaggaaggaagaaaggttattatatatgtaccactaagcaaatatatatatatatatatatttggggttttttttccctaatattatttgggtgtcccctgtgcttctttaggatgtagttataactaaacctgttatacttgaacatcactaagagaagtaaattattatgaagctagcaaaaatcttgaggccaaagttgtttcttaacagctttaataatgcttgttgattttgaataatcctttaaaaagtggaccatttgcttattttaatatcacgtcagtaaaatgttagtattaaaaagatcagctttttatggcattgaagaatgtatctgctaagacacaaaaattgcatggtaagtataataggtggaggaggaaaggttgtaggccggatgaaaatttaactgactagaacatttattcaggagtgtaattattttcccttaccccaatccctgtgtacgtgttgggtatagttacgacattatccggatttgcaaatagacacaactttcagtcttaccctgtttattgtttaagagtgatagactgttgtcctcttgctggtggaaaatctaaggtggagcccactcttctatgctgaagttcaccaggcagagcagttttcttacaagtcagctactctgcttggtttattttaggttttggtacttcacgtaagcactgttagaaggtacaagtgtattaatatcactagttttgaggcgcttgggtacatttgtttttaatatatttagaatgtgcagtaaacttttttctcatttttttttctttttagcaaacttgttattttaggtccaattattgagttgacagtctactgtgagaatgagatgacatatctactgtgagaataccataaatgatgaatagtttatttgagaacttttatactcagtggtgttttatatattaagataaaaatatgtacacacatgcatgtcacatctctctactgtggagttaatgtgaatttttaaaaaatggaattgcaaccacaatcatatctaagagaacattcactcctagtgagggtttacaaaagctactaagagaataaggtagatgataatgcaaagggtcatgatttggggttatttttgttttattttaaaatttatactgctacttttgaaagaattgtttttatgactatgctctttttgtgattgaaaagtcatctaatagaagctgtatagaagctactttttaattgctggcaaacagctttaagtgcactttctttgattacacttccattttttgttaaacttgaattttctgaagccttttatgtaccactaagcaaataactttaacctttaaataaagcaaatttacatctttattgtatttctacttgttacaaaacatacttgctaaagtaacttcagtcctcaaatatagctgggaaacaattatgagatagactcagtctccccctcccaccccttttcccctgccatatctaattaagcactaactgattttattactttattgcctttacactgcttattctttttgactgaattctgtccctgattcactgttttgtttgaaatttaaagttattttcttactgtatttatcatacctgttttaatctgttttctttaaatgcaataaatcccaaatggattgcatattctttataa

SEQ ID NO: 832 - RNA, 1876 nt, Homo sapiens
  source 1..1876: mol_type = transcribed RNA
ggggcccactcccgagcgcaggcgggcagccaggcgggcggcgcggcgcgggccggcaggaagcgtattctgggcacggggcgccgggcgggccggctgcgccgagcggcagtggtgggataccacccaaggcctcgcgcggcgccgcccgtcgaggggcgggcggcggcgtagccactgggccgtcgaagagcgcaggaggccggtgggccgggccgggccgcgcggcgcagccatgcctggctttacgtgctgcgtgccaggctgctacaacaactcgcaccgggacaaggcgctgcacttctacacgtttccaaaggacgctgagttgcggcgcctctggctcaagaacgtgtcgcgtgccggcgtcagtgggtgcttctccaccttccagcccaccacaggccaccgtctctgcagcgttcacttccagggcggccgcaagacctacacggtacgcgtccccaccatcttcccgctgcgcggcgtcaatgagcgcaaagtagcgcgcagacccgctggggccgcggccgcccgccgcaggcagcagcagcaacagcagcagcagcagcaacagcagcaacagcagcagcagcagcaacagcagcagcagcagcagcagcagcagcagtcctcaccctctgcctccactgcccagactgcccagctgcagccgaacctggtatctgcttccgcggccgtgcttctcacccttcaggccactgtagacagcagtcaggctccgggatccgtacagccggcgcccatcactcccactggagaagacgtgaagcccatcgatctcacagtgcaagtggagtttgcagccgcagagggcgcagccgctgcggccgccgcgtcggagttacaggctgctaccgcagggctggaggctgccgagtgccctatgggcccccagttggtggtggtaggggaagagggcttccctgatactggctccgaccattcgtactccttgtcgtcaggcaccacggaggaggagctcctgcgcaagctgaatgagcagcgggacatcctggctctgatggaagtgaagatgaaagagatgaaaggcagcattcgccacctgcgtctcactgaggccaagctgcgcgaagaactgcgtgagaaggatcggctgcttgccatggctgtcatccgcaagaagcacggaatgtgaactggtgccccggcagcctgctggactcccagaccccatccagccaggggaccgcaggccattgttgaactcctctatactcctgggcactggttgacagtactgaggcttaaggcagctggactctcttgctggtgacctggcatcctcaattgtttcctcctgaagtggaagctggggccttagactctgccctggtgacaccagcaattatgactttgtctacccttcctccccagttattgttgcagattctggttaagcagaggcttcagaaccactgaacttgaaacttaccctctagggatgcaggtgggatgtccagggactataggtttgggaaaaccataccttaaggttggtcagcagtcagacaactctaatgtgtgtagtgataagagattcaagtaacatcagttctcctccttttcatgcttttccttcccaggtgcagcctgtgattctgatggggactggtaaatctgtgcctctgcctcctaggacttattttcccaggaggccatttacaaggggatctggatgacctgctgatggagatccagcttgccagggacttaggtttatcctgttttgtttgctactggttacaaattctattttctgtacaattagtcagactaaagttttcactgtgtttgtttggcaaaacaaattaaacaaaaagtaaggttttta

SEQ ID NO: 833 - RNA, 15817 nt, Homo sapiens
  source 1..15817: mol_type = transcribed RNA
atttacataaagcgattccgggcgggcggcggcagaggaggaggcggcggcggcgggcaggccggggacccggacgccagcgccgcgccccgtgggtgaatccccgccgcgtcccggggacctccctccggggacgggccgaccgccagccctgccgccaccatgagctcccctcccctgtctccgggccccctgctcctgaccagagccacctccgagtcctggggccagcgggaggtggggagcatgccgcctggggtgggtgagctcggggctcgggtgccactggaatttcccgttgttgcgcatggcggcgcggcccccggacctgcaagtgccgcctccctccggaggtgcgcggaggcttggtgtgccaggtccgagcctccgtactgggtgcaatgaaagctccacgcaggccttaccatggaaggctgtgactcgcccgtcgtctcggggaaggacaatgggtgcggtatccctcagcaccagcaatggactgaactcaacagcacccacctccctgacaaacccagtagcatggagcagtccacaggcgagagccacgggcccttggacagcctgagggcccccttcaatgagcgcctcgcggagagcaccgcgtcggccgggcccccctccgagcccgccagcaaggaggtcacctgcaacgaatgttcggcctcctttgccagcctccagacctacatggagcaccactgccccagcgcgcgccccccgccacccctgagagaggagagcgccagcgacaccggtgaggagggggacgaggagagtgacgtggagaacctggccggggagatcgtctaccagccggacggctccgcgtacattgtggagagcctgagccagctgacccagggcgggggcgcctgtgggagtggcagtggcagtgggcctctcccctcgcttttcctgaactctctccctggcgcggggggcaagcaaggggacccttcgtgtgctgcacccgtgtacccgcagatcatcaacactttccacatagcctcatccttcgggaaatggtttgagggcccagaccaggctttcccgaatacctcagccctggcggggctcagccccgtcctgcacagcttccgcgtgtttgacgtgcgacacaaaagcaacaaggattacctgaacagcgacggttctgccaaaagctcctgcgtatccaaagatgttcccaacaatgtggacctgtccaaattcgatggctttgtgctctatggcaagaggaagcccatcctgatgtgtttcttgtgcaaactctcctttgggtacgtccgttcgtttgtgacccacgcggtgcatgaccatcgaatgaccctgagcgaagacgagcggaaaattcttagcaataagaacatctccgctatcatccaagggatcggcaaagacaaggaaccccttgtaagttttctggaaccaaaaaacaaaaactttcaacaccctttagtttccacagctaacctcataggccccggacacagtttttatggtaaatttagtggcattcgaatggaaggggaggaagctctcccagcgggctccgccgctggccccgagcagccccaggctggtctcttgacccccagcaccctgttgaaccttggcgggctcaccagctcggtactgaagacccccattacctcagtccccctggggcctctggcttccagtcctaccaaatcctcagagggcaaggactctggggcggcagaaggagagaagcaggaagtgggcgacggggattgcttctctgagaaggtagagccagccgaagaggaggcggaggaggaagaggaggaggaagaggcggaggaggaggaggaagaagaggaggaggaagaagaggaggaggaagacgagggttgcaaaggactctttccaagcgagttggatgaggaactggaggacaggccccatgaggagcctggggccgcagcaggtagtagcagcaaaaaggaccttgctctctcaaaccaaagcatttctaactcccccttaatgcctaacgtgctccagaccctgtcgaggggcacagcttctactagttctaattctgcttcttcctttgttgtctttgatggtgcgaacaggaggaatcgtttaagctttaacagtgagggcgtcagggccaatgtggcagagggcggcaggaggctggacttcgctgacgaaagtgccaataaagacaatgccacagcaccagaaccaaatgaaagcacagagggtgacgatgggggcttcgttccccatcaccagcacgctggctccctctgcgagcttggggttggggagtgcccctcggggagtggcgtggagtgccccaaatgcgacacggtcctgggctcctcccgctcgctgggcggccacatgaccatgatgcattctcgtaactcgtgtaagacactcaagtgccccaagtgcaactggcactataagtaccagcagaccctggaggcacacatgaaggagaagcacccggagccggggggctcctgtgtctactgcaaaagcgggcagccccacccccggctggcacgaggcgagagctacacgtgtggttacaagcctttccgctgcgaggtgtgtaactactccacaactaccaaaggcaacctcagtattcatatgcagtctgacaagcatctcaacaacatgcagaacctgcagaatggagggggggagcaggtcttcagccacactgccggggcggcggcggcggcggtggctgcggcggcggcggcagccaatatcagtagctcctgcggggccccctcgccgaccaaaccaaaaaccaaacccacctggcggtgcgaggtgtgtgattatgagaccaacgtggccaggaacctccgcattcacatgaccagtgagaagcacatgcataacatgatgttactgcaacagaacatgacccagatccaacacaaccgccacctgggcctcggcagcctgccctcacccgccgaggccgagctctaccaatactacctggcccagaacatgaacctgcccaacctgaagatggacagtgctgcctcggacgcccagttcatgatgagcggattccagctggatcccgccgggcccatggccgccatgacgcctgctctagtgggcggtgagatccccctagacatgcggctcgggggcgggcagctggtgtcagaggagctgatgaacctgggcgagagcttcatccagaccaacgacccgtcgctgaagctcttccagtgcgccgtctgcaacaagttcacgacggacaacctggacatgctgggcctgcacatgaacgtggagcgcagcctgtcggaggacgagtggaaggcggtgatgggggactcataccagtgcaagctctgccgctacaacacccagctcaaggccaacttccagctgcactgcaagacagacaagcacgtgcagaagtaccagctggtggcccacatcaaggagggcggcaaggccaacgagtggaggctcaagtgtgtggccatcggcaaccccgtgcacctcaagtgcaacgcctgtgactactacaccaacagcctggagaagctgcggctgcacacggtcaactccaggcacgaggccagcctgaagttgtacaagcacctgcagcagcatgagagtggtgtagaaggtgagagctgctactaccactgcgttctgtgcaactactccaccaaggccaagctcaacctcatccagcatgtgcgctccatgaagcaccagcgaagcgagagcctgcgaaagctgcagcggctgcagaagggccttccagaggaggacgaggacctggggcagatcttcaccatccgcaggtgcccctccacggacccagaagaagccattgaagatgttgaaggacccagtgaaacagctgctgatccagaggagcttgctaaggaccaagagggcggagcatcgtccagccaagcagagaaggagctgacagattctcctgcaacctccaaacgcatctccttcccaggtagctcagagtctcccctctcttcgaagcgaccaaaaacagctgaggagatcaaaccggagcagatgtaccagtgtccctactgcaagtacagtaatgccgatgtcaaccggctccgggtgcatgccatgacgcagcactcggtgcaacccatgcttcgctgccccctgtgccaggacatgctcaacaacaagatccacctccagctgcacctcacccacctccacagcgtggcacctgactgcgtggagaagctcattatgacggtgaccacccctgagatggtgatgccaagcagcatgttcctcccagcagctgttccagatcgagatgggaattccaatttggaagaggcaggaaagcagcctgaaacctcagaggatctgggaaagaacatcttgccatccgcaagcacagagcaaagcggagatttgaaaccatcccctgctgacccaggctctgtgagagaagactcaggcttcatctgctggaagaaggggtgcaaccaggttttcaaaacttctgctgcccttcagacgcattttaatgaagtgcatgccaagaggcctcagctgccggtgtcagatcgccatgtgtacaagtaccgctgtaatcagtgtagcctggccttcaagaccattgaaaagttgcagctccattctcagtaccatgtgatcagagctgccaccatgtgctgtctttgtcagcgcagtttccgaactttccaggctctgaagaagcaccttgagacaagccacctggagctgagtgaggctgacatccaacagctttatggtggcctgctggccaatggggacctcctggcaatgggagaccccactctggcagaggaccataccataattgttgaggaagacaaggaggaagagagtgacttggaagataaacagagcccaacgggcagtgactctgggtcagtacaagaagactcgggctcagagccaaagagagctctgcctttcagaaaaggtcccaattttactatggaaaagttcctagacccttctcgcccttacaagtgtaccgtctgcaaggaatctttcactcaaaagaatatcctgctagtacactacaattctgtctcccacctgcataagttaaagagagcccttcaagaatcagcaaccggtcagccagaacccaccagcagcccagacaacaaaccttttaagtgtaacacttgtaatgtggcctacagccagagttccactctggagatccatatgaggtctgtgttacatcaaaccaaggcccgggcagccaagctggaggctgcaagtggcagcagcaatgggactgggaacagcagcagtatttccttgagctcctccacgccaagtcctgtgagcaccagtggcagtaacacctttaccacctccaatccaagcagtgctggcattgctccaagctctaacttactaagccaagtgcccactgagagtgtagggatgccacccctggggaatcctattggtgccaacattgcttccccttcagagcccaaagaggccaatcggaagaaactggcagatatgattgcatccaggcagcagcaacaacagcagcagcaacagcaacaacaacaacaacaacaacaacaacaagcacaaacgctggcccaggcccaggctcaagttcaagctcacctgcagcaggagctgcagcaacaggctgccctgatccagtctcagctgtttaaccccaccctccttcctcacttccccatgacaactgagaccctgctgcaactacagcagcagcagcacctcctcttccctttctacatccccagtgctgagttccagcttaaccccgaggtgagcttgccagtgaccagtggggcactgacactgactgggacaggcccaggcctgctggaagatctgaaggctcaggttcaggtcccacagcagagccatcagcagatcttgccgcagcagcagcagaaccaactctctatagcccagagtcactctgccctccttcagccaagccagcaccccgaaaagaagaacaaattggtcatcaaagaaaaggaaaaagaaagccagagagagagggacagcgccgaggggggagagggcaacaccggtccgaaggaaacactgccagatgccttgaaggccaaagagaagaaagagttggcaccagggggtggttctgagccttccatgctccctccacgcattgcttcagatgccagagggaacgccaccaaggccctgctggagaactttggctttgagttggtcatccagtataatgagaacaagcagaaggtgcagaaaaagaatgggaagactgaccagggagagaacctggaaaagctcgagtgtgactcctgcggcaagttgttttccaacatcttgattttaaagagtcatcaagagcacgttcatcagaattactttcctttcaaacagctcgagaggtttgccaaacagtacagagaccactacgataaactgtacccactgaggccccagaccccagagccaccaccacctccccctccaccccctccacccccacttccggcagcgccgcctcagccggcgtccacaccagccatccccgcatcagccccacccatcacctcacctacaattgcaccggcccagccatcagtgccgctcacccagctctccatgccgatggagctgcccatcttctcgccgctgatgatgcagacgatgccgctgcagaccttgccggctcagctacccccgcagctgggacctgtggagcctctgcctgcggacctggcccaactctaccagcatcagctcaatccaaccctgctccagcagcagaacaagaggcctcgcaccaggatcacagatgatcagctccgagtcttgcggcaatattttgacattaacaactcccccagtgaagagcaaataaaagagatggcagacaagtccgggttgccccagaaagtgatcaagcactggttcaggaacactctcttcaaagagaggcagcgtaacaaggactccccttacaacttcagtaatcctcctatcaccagcctggaggagctcaagattgactcccggcccccttcgccggaacctccaaagcaggagtactggggaagcaagaggtcttcaagaacaaggtttacggactaccagctgagggtcttacaggacttcttcgatgccaatgcttacccaaaggatgatgaatttgagcaactctctaatttactgaaccttccaacccgagtgatagtggtgtggtttcagaatgcccgacagaaggccaggaagaattatgagaatcagggagagggcaaagatggagagcggcgtgagcttacaaatgatagatacattcgaacaagcaacttgaactaccagtgcaaaaaatgtagcctggtgtttcagcgcatctttgatctcatcaagcaccagaagaagctgtgttacaaggatgaggatgaggaggggcaggacgacagccaaaatgaggattccatggatgccatggaaatcctgacgcctaccagctcatcctgcagtaccccgatgccctcacaggcttacagcgccccagcaccatcagccaataatacagcttcctccgctttcttgcagcttacagcggaggctgaggaactggccaccttcaattcaaaaacagaggcaggcgatgagaaaccaaagctggcggaagctcccagtgcacagccaaaccaaacccaagaaaagcaaggacaaccaaagccagagctgcagcagcaagagcagcccgagcagaagaccaacactccccagcagaagctcccccagctggtgtccctgccttcgttgccacagcctcctccacaagcgccccctccacagtgccccttaccccagtcgagccccagtccttcccagctctcccacctgcccctcaagcccctccacacatcaactcctcaacagctcgcaaacctacctcctcagctaatcccctaccagtgtgaccagtgtaagttggcatttccgtcatttgagcactggcaggagcatcagcagctccacttcctgagcgcgcagaaccagttcatccacccccagtttttggacaggtccctggatatgcctttcatgctctttgatcccagtaacccactcctggccagccagctgctctctggggccatacctcagattccagcaagctcagccacttctccttcaactccaacctccacaatgaacactctcaagaggaagctggaggaaaaggccagtgcaagccctggcgaaaacgacagtgggacaggaggagaagagcctcagagagacaagcgtttgagaacaaccatcacaccggaacaactagaaattctctaccagaagtatctactggattccaatccgactcgaaagatgttggatcacattgcacacgaggtgggcttgaagaaacgtgtggtacaagtctggtttcagaacacccgagctcgggaaaggaaaggacagttccgggctgtaggcccagcgcaggcccacaggagatgccctttttgcagagcgctcttcaaagccaagactgctcttgaggctcatatccggtcccgtcactggcatgaagccaagagagctggctacaacctaactctgtctgcgatgctcttagactgtgatgggggactccagatgaaaggagatatttttgacggaactagcttttcccacctacccccaagcagtagtgatggtcagggtgtccccctctcacctgtgagtaaaaccatggaattgtcacccagaactcttctaagcccttcctccattaaggtggaagggattgaagactttgaaagcccctccatgtcctcagttaatctaaactttgaccaaactaagctggacaacgatgactgttcctctgtcaacacagcaatcacagataccacaactggagacgagggcaacgcagataacgacagtgcaacgggaatagcaactgaaaccaaatcctcttctgcacccaacgaagggttgaccaaagcggccatgatggcaatgtctgagtatgaagatcggttgtcatctggtctggtcagcccggccccgagcttttatagcaaggaatatgacaatgaaggtacagtggactacagtgaaacctcaagccttgcagatccctgctccccgagtcctggtgcgagtggatctgcaggcaaatctggtgacagcggagatcggcctgggcagaaacgttttcgcactcaaatgaccaatctgcagctgaaggtcctcaagtcatgctttaatgactacaggacacccactatgctagaatgtgaggtcctgggcaatgacattggactgccaaagagagtcgttcaggtctggttccagaatgcccgggcaaaagaaaagaagtccaagttaagcatggccaagcattttggtataaaccaaacgagttatgagggacccaaaacagagtgcactttgtgtggcatcaagtacagcgctcggctgtctgtacgtgaccatatcttttcccaacagcatatctccaaagttaaagacaccattggaagccagctggacaaggagaaagaatactttgacccagccaccgtacgtcagttgatggctcaacaagagttggaccggattaaaaaggccaacgaggtccttggactggcagctcagcagcaagggatgtttgacaacacccctcttcaggcccttaaccttcctacagcatatccagcgctccagggcattcctcctgtgttgctcccgggcctcaacagcccctccttgccaggctttactccatccaacacagctttaacgtctcctaagccgaacttgatgggtctgcccagcacaactgttccttcccctggcctccccacttctggattaccaaataaaccgtcctcagcgtcgctgagctccccaaccccagcacaagccacgatggcgatgggccctcagcaacccccccagcagcagcagcagcagcagcaaccacaggtgcagcagcctcccccgccgccagcagcccagccgccacccacaccacagctcccactgcaacagcagcagcaacgcaaggacaaagacagtgagaaagtaaaggagaaggaaaaggcacacaaagggaaaggggaacccctgcctgtccccaagaaggagaaaggagaggcccccacggcaactgcagccacgatctcagccccgctgcccaccatggagtatgcggtagaccctgcacagctgcaggccctgcaggccgcgttgacttcggaccccacagcattgctcacaagccagttccttccttactttgtaccaggcttttctccttattatgctccccagatccctggcgccctgcagagcgggtacctgcagcctatgtatggcatggaaggcctgttcccctacagccctgcactgtcgcaggccctgatggggctgtccccaggctccctactgcagcagtaccagcaataccagcagagtctgcaggaggcaattcagcagcagcagcagcggcaactacagcagcagcagcagcaaaaagtgcagcagcagcagcccaaagcaagccaaaccccagtcccccccggggctccttccccagacaaagaccctgccaaagaatcccccaaaccagaagaacagaaaaacaccccccgtgaggtgtcccccctcctgccgaaactccctgaagagccagaagcagaaagcaaaagtgcggactccctctacgaccccttcattgttccaaaggtgcagtacaagttggtctgccgcaagtgccaggcgggcttcagcgacgaggaggcagcgaggagccacctgaagtccctctgcttcttcggccagtctgtggtgaacctgcaagagatggtgcttcacgtccccaccggcggcggcggcggtggcagtggcggcggcggcggcggtggcggcggcggcggcggcggcggctcgtaccactgcctggcgtgcgagagcgcgctctgtggggaggaagctctgagtcaacatctcgagtcggccttgcacaaacacagaacaatcacgagagcagcaagaaacgccaaagagcaccctagtttattacctcactctgcctgcttccccgatcctagcaccgcatctacctcgcagtctgccgctcactcaaacgacagcccccctcccccgtcggccgccgccccctcctccgcttccccccacgcctccaggaagtcttggccgcaagtggtctcccgggcttcggcagcgaagcccccttcttttcctcctctctcctcatcttcaacggttacctcaagttcatgcagcacctcaggggttcagccctcgatgccaacagacgactattcggaggagtctgacacggatctcagccaaaagtccgacggaccggcgagcccggtggagggtcccaaagaccccagctgccccaaggacagtggtctgaccagtgtaggaacggacaccttcagattgtaagctttgaagatgaacaatacaaacaaatgaatttaaatacaaaaattaataacaaaccaatttcaaaaatagactaactgcaattccaaagcttctaaccaaaaaacaaaaaaaaaaaaaaaaagaaaaaaaagaaaaagcgtgggttgttttcccatatacctatctatgccggtgattttacattcttgtctttttcttttcttttaatattaaaaaaaaaaaaaaagccctaaccctgttacattgtgtccttttgaaggtactattggtctgggaaacagaagtccgcagggcctccctaatgtctttggagcttaaaccccttgtatatttgccccttttcaataaacgccccacgctgatagcacagaggagcccggcatgcactgtatgggaaagcagtccaccttgttacagttttaaatttcttgctatcttagcattcagataccaatggcttgctaaaagaaaaaaagaaatgtaatgtctttttattctcaggtcaatcgctcacactttgttttcagaatcattgttttatatattattgttttttcagtttttttttttttttttgttccagaaaagattttttgttttgttaacttaaaaatgggcagaaagtattcaagaaaaacaatgtgaactgctttagctttctggggatttttaaggatagcttttctgctgaagccaatttcaaggggaaaagttaagcactcccactttcaaaaaaaaaaaaaaataataacccacacacacaaagagtgttgaggacttgtagcttaaaaaaaataagttttaaaaactgactttctgtatttatgatagatatgaccatttttggtgttgagtagattgttgcattggaaatgaactgaagcagtatggtagatttaaaaggaaaaaaaaaaaaaaaccttttgtgtacatttagctttttgtatggtccagctgacagctcctcatttgatgttgtcttgttcattcctagcagatgatagattgcaatccgttgattcgcctaagcttttctccccttgtcccttaattccactttctctttcttgtcccttaattccactttctctttccttctcccacctcccgtcctataatctcccacttaaggtagctgccttcatttcttagagggagctgcagaattattttataaaactaaagaaagaatttcaagggattctaggggtcattaggatcctcacagattatttttggttggggagttgaaactttttaaaggcatataattctagttacctgtgtctgttagctttgtgcatttattttttatttatccttcttttggcttttttttctttgtaccccttcttttcctccttgtttggtaggagcttcaaatattctttttttttctatactaaaggatttgtttccatttgtgtaattggctgtgtacttttcttttctaaaaaaagtttttggttagggatttggtttttggttttgtgtttgttttttctttcctctctcagaaaaaaaaatttcatgctttaaataaaatccaaagacacaccctttcactgctgatgcagaaaaaagggaaagggttcttgttacttgagaatttgtttctgatttaaacaaacaagacttagtttaataaaagaaagagaaaaacaaaagattcccaggttgttatgtgcttcttctgcaagcagagaggcaaatgttaatgacaattccatataccaaaagacacattttttacttcaaagttttgtccttgtgttaggcagtctgagcagcgagtgatccagagcgcagccaacaaagcagcagatagcagtgtacagaaagcaaaaaaggaactgtatgtgaggcacttgtttctgttaatatccatattcctgttaacacacaccctttctcatgtaaaaagaaaaataaataaatggtctgaactttgaaaactttgtgctgctaaaacatagattttggagacaaataaatagatgctttgctgtttcactttcatagctaaacatcaacagaaaccatctccccttgcccccaaagtgtgaaatccttcttcccttcgttttcttccttatgtttcaaaagggaactttgaagactgtgaatacaggttccattggtcacctttcgggcttctttccccagtgctgaagccactcatcgactttgcaaaagactggagcattccaagatctgaaaatggattttttttctttttttcttttttagccgggactattttatttttatgaatttgtttttagtttaatgaaatagtagatcctgaaatgttgtacatatttctaactaggctgatgcacagtgcaaattccttttttaattgttttttttaagtagaaatactaaagaaagaataccatctaactattcataccagtatccagttgtagcataaggtgtcaaaagcaagtacgcaaaacatttactgttttaacaagctatttccttttaacaagaaatcttgtatttcttcctgtgtttgagatgaacatttttaaattttaaagttgtacagttttttgttttccattattttatcttgtttgtaactctatgaaatatatatatatatattttttgccatttaactgttgtatgttactctgtgtctgtaccatatagaaaaaaaattgtttttgtttttggttctctatgtgatatcagttaacaatgtaacactagctttacctgtcaaattctgctaggtcttctctgaaaacgttgtttttaaaaatgatattgcttggtaatagtgcaatttctatccttttccctcccccctcaacttttaagttcttttctttataattttgctgccccctccctgatggtttgggtttttgtttttgtttttgtttttttttttcatggagctactatgccatcctccctctgtgaggcagagtgactgtcagtgttttgttatgccatgccttgagctgtgggtgtttggcgacaataaggtggttgaatagattggctgagcacacttccacccacctagtgttctcagaggggttatgtgattgtttcaacctggagtgggttgcacccttaatgctttcctctgcaactaaaccgcccacatatatgttcattgaaaaaagtaagaataattctcagcactaacccagaagtagcaaagcagtcagtgatggtgaacattagaggtcaaacatgagttagatgtttgtgggctgacagccatcgtggctatgaccagtactatttacaaagcatgaattcactacaatgctcaactgtttgtttagctttatctcacttggggaatttattcctgtctgctgcattgtaggtagctgggtaggatatatttccacttgctttttaaattagttcttcacctccattgacactcgttttttggttttctccctatagtgtgggttggtgctagacaccagtctgacccacagaatgggagttatttcatccatctttcctccatccttccaaaaaccacatatctacacaaggaaaaatttaatacatctaggaattttttttttaattacaagctatttaaagagatgaatgtggccaaagttttacacaattgaaaataaagtaaaacagacggcatgtgtttaaacctgagtttatcaggcatggcaggaagttgcaggagagagaggcagtgacccaagccagtgcacttgatgttcatggacatatattttttttaaataataaattaaaacattttaaatagaagcataaattgagttgtttgttggcgctgagatactgcccactgtgaaacaaagctttgactagttttttgtttgtttactttcttcaggggggaggggggcaagtttgggtaggaaagaaagcataaatgaacgtgaccctgaggtgaagaggtatatgaacagcctttgcaatgtacaaaaagaaaaaaaaacaaaaaacaacaaaaaaaatagagcaagtgaaaccaaaaatgatgttcttggtgtttttctataatgtagtcttgttagcttttttgttactgtaacaatgctgatctcgaactgtaccaaaatacatggagactaacaaacagaaccacatggaactttcaaactgaaaaaaaaatttgtcacaaaaactttgttgtcatagttaagttgattgtagatggtaattgaatatactcctttgaaaatatttcatcaagtatgtttcctgctcattgtgatacattaaaaaaaaaatatgagcaaaa

SEQ ID NO: 834 - RNA, 4885 nt, Homo sapiens
  source 1..4885: mol_type = transcribed RNA
agagagctggagagagcagggagaggggggagcgccgagctagtcagagagtgagcgagagcgagaaggagggagaggaggagaaagagagcgagggcgggcgggaggcggcggcggcggcagcagcagcagtaatagcaggagcagcaacagaaggcgtcggagcgggcgtcggagctgcccgctgtgggagagagaggagacagaaagagcgagcgaggagagggagcccgaggcgaaaaagtaactgtcaaatgcgcggctcctttaaccggagcgctcagtccggctccgagagtcatggcgaccgcagcgtctaaccactacagcctgctcacctccagcgcctccatcgtgcacgccgagccgcccggcggcatgcagcagggcgcggggggctaccgcgaagcgcagagcctggtgcagggcgactacggcgctctgcagagcaacggacacccgctcagccacgctcaccagtggatcaccgcgctgtcccacggcggcggcggcgggggcggtggcggcggcggggggggcgggggcggcggcgggggcggcggcgacggctccccgtggtccaccagccccctgggccagccggacatcaagccctcggtggtggtgcagcagggcggccgcggagacgagctgcacgggccaggcgccctgcagcagcagcatcagcagcagcaacagcaacagcagcagcaacagcagcaacagcagcagcagcagcagcaacagcggccgccgcatctggtgcaccacgccgctaaccaccacccgggacccggggcatggcggagcgcggcggctgcagcgcacctcccaccctccatgggagcgtccaacggcggcttgctctactcgcagcccagcttcacggtgaacggcatgctgggcgccggcgggcagccggccggtctgcaccaccacggcctgcgggacgcgcacgacgagccacaccatgccgaccaccacccgcacccgcactcgcacccacaccagcagccgccgcccccgccgcccccgcagggtccgcctggccacccaggcgcgcaccacgacccgcactcggacgaggacacgccgacctcggacgacctggagcagttcgccaagcagttcaagcagcggcggatcaaactgggatttacccaagcggacgtggggctggctctgggcaccctgtatggcaacgtgttctcgcagaccaccatctgcaggtttgaggccctgcagctgagcttcaagaacatgtgcaagctgaagcctttgttgaacaagtggttggaggaggcggactcgtcctcgggcagccccacgagcatagacaagatcgcagcgcaagggcgcaagcggaaaaagcggacctccatcgaggtgagcgtcaagggggctctggagagccatttcctcaaatgccccaagccctcggcccaggagatcacctccctcgcggacagcttacagctggagaaggaggtggtgagagtttggttttgtaacaggagacagaaagagaaaaggatgacccctcccggagggactctgccgggcgccgaggatgtgtacggggggagtagggacactccaccacaccacggggtgcagacgcccgtccagtgaactcgagctgggggaggggcagagcgcggggctccccctccccttcggtccttggccctttcccggccctcttgttccctctctaacttctgattgttcttttatttttaattattatttccccgtcccttaaaaagacaaaaaaaataaggcaaaaggaaagcaactaagacactggactatcctttaaaggtagcaggtgtaatgatgtgttttgacctttgcaggcgagtaaccaggcaatggagtggagtgtctcctggagagagtgaggagagtgtgtgatagctagaaagagagagagacagagagatggcaagcactgagataaatacctggcaaaactaaataaattaccaaaaaggaaaaaaaatccaccaaaccatgataaacacaaaatgcagcttcctgatgcttagagttggcacatgctgctgtgtttatttattgtggattcccatcaggaaagaggaaaaaatacacatgttctttcatataggcaaaatttaaccacataaatttgcactgcaagaaaattgaagtttacgtgaacaaattcatgagcatattttctctttctccccaccgttaatttgggagttgccgttttgggggattttgttttgctttgctttattcatcggagagagttgaagccagctcttggccactctccatttctaatgttcttgtgttgccccttcttcgtactgtttgtgaactttggttaccttcacattccccttacgagggtgtaacatctatttgttcctcttaccaaagcaaaaggattggcttcatacaaaatagacaattctctgatttcaggaaatgtgcatggtctacccgctttatcgaaggcaagaatccggtttggaatataaaaataagcattggttgttcttaccagccacaaagtaaacttcattttcaggcagtgtttctgggggaggttatggagggaagaaaaaagaaaaatcgatagtgagtgactgattgcttcattttatcaggcgggcccattgtgaaagagctcaggggaaatgtggaggttaaatatatttccagagttgtccagcagaaagaaagtggcactttgaagagaactagggaagtacatatcttcagatatccctatatagttctctaccttcagttttagtaacaattatgaagaattatttgtgctgacagcagcagttaaactttgtttctctaatagctttttttttacataaaaaaagacccaggaacttaatagtgtatgcataagactgtgttttttagcacacagatacccacagcatacactgacgatctccacgcagtagacaggttttgtcttcactagctcatttgtttatcaagtcatatttagggtcccacaccctcttttcctgtaatttattgcagaatacaccactttgacttggacagctttctgccccctctttcactaaggaaggcaaatgaagtgaaaaaaaaaaatgccattttcaatccttcctttctcccctttgttaatagttttaagtgaatttttgaccttatcttaatggaaaacggttaactccaaacacaaaagactctactggaaagtgtaggtgaaaaaacttgtaactgtattgaaaataaataccattaaactgtgatcagttaaaatttaaaagaaaaatcagcacaaaagggcgctaaaagggaaaacactttttattaatcttaaaagtttgggggtttttttccagttaggtattagataaatttttattttaaaaaatgaaagtctcactaccataaaattatggttcagcatcagattagcattgcactcagtagtctttaaggttttaggaaatatgctttatattgtcttttcaaacacctgtgattgtttcattttccatgtttttgcaagataaatggtgacttataatgggcatatttatttgcctgtatttcatttcccccaatgaatgtcacaaggagatgggcacggagctgcttcgggtgcatcacgctgctcgttcctgaggtatgggaactggcctttagtgaagctatccagagcagggcaaatagccactggtaaagggaggaaatgaatttccagatacttattaccaagtaggtaaggtcagaagctggagttcagagaatgtgtctacagcttctctgactcttataggtttactaagatgaaagttaccactgaaccttaccactatgtatatatgtttaatatctgtcttttgaaatgcagaaatagtttaaatgtttctttgtctatttttctttttttttaatgctacccagggaaatattttcatatcatttttaagtggcctgcctcaatgtatatttatttcttttgaaacaaaaaggttctggaaactgtttttctgtagctttaaatgaataggtgagcaaaatctatatgggatgtaatttttttgttcagtctcttaaaaaatactttgttttggtacatttggttgtgcttgtggggaaaataaaaacgcagagatccttatatatttatgttaaagtaatattttattatctacataaaacagaaatgcacaataccttcatagtttgttctaattattgaaatatctttattttatttttaaagatagtgccaagttttaaggggggaaaaccctagaccttaaattgactgagttgagttgtgtgtaaaacacttcccttcctttatacttcataaagttttggaataaattttatgcatatactgccagatttgatgttcataactttcagaggctttttttttttttaatggagactactggtctaattcactttactttgcaaaaactatcagtcccaaatctttcagtcactatgcctgtagcattaaattgaaatggtcattgggtttgagcttcaatttgcttgccatttcatggtcctacaaagagatgtttgtcccctttaaacatatgcagatatgcctgcatcttctttccaggttaactataccttattcgattgtgctgttttggagaacatcagtggaactaggtggactttgatctctacccataggtcctcaaataatttgggatctacagaaaagcaggatttagtagattattatttttaataatttacaaatatctcttaacaaagaataaccctgatagtatactattgtgagtttactaaatgattagaagtagatcctatacattattcctgtttggtttgcataaaaagatgaatttta

SEQ ID NO: 835 - RNA, 7121 nt, Homo sapiens
  source 1..7121: mol_type = transcribed RNA
actctctctctttctctccctctcctatcggagcacaatgaaagcctgtgtatcgccgtgactccgggcgcgagccagtgtcagcaaagcggctaacaacagacgagaaagagaaaggaaaatacaagctactttttttttccatctataaagcggagcaaatacaggagatagaaccagattgcttattgcgagtccagaccctcagatccactggccggggatggaatgtacaaaagtggacagaaaagtggctggacatgactcggtgcaatttgctggaagtttgtaagtttgaccatcgtttgtaaattactctcggaagagtttgtctctcttgatactgtattagaatagagccgggggtgaggaatagaaacgtaagcgggaaagaaaaaaatgtgttgaaggatctctctcagtggctagcgacttaagattgcttttcatttaaggctaggaaaccttagagggagtgaggattttaccggtgattggattagctgaagaaaaaagcatggtccaaaagtccaattactgacattgttaacagttgaaaagctgtctccctcttttgggagaagacaacatcctacagtaccccaaagaggagaaaacaccggagcgaaaggaaagggaggaaaaattaaaagccaaaagacagtctcccttgatttttgcacattttgaacagtgacttaaacatcttctgaaacagcactgttttgttttgttttggttttttatttaacctgaggaaaagtcaaggctgctggttacatagacatggtagaaatgtgtttctctgcagaaacatccccataaagaattgtcggaaacaactaggtgagggggagtcctctctattaatacctctctcaataccttttgctgtgtgtttctgtctcttgctggacaatccctgaattcttgatctaacccccagatcgtgtgtttacaaagtacctagtggctcttgtcagcttggtggaggaaaaaaaatccaccaactctgtccaacttctccagagctgtcaaatgcaattagagtaagttaatcagggtttgtttccaacttatcctccccccagttggtttctattctttctccccaccctctttttactaactcccctcccccacaacttctccacggctcccccacaacctctgaagacctctattcatgtggccctgaacactgagctcacattgtcaaaaacagacttgcctgcaatagccagcagtagcctctttccacctcaccatcccagaggcagcaatcattgtgtccggtaagatgggggacacagcgcccccgcaggcccccgcaggagggctagggggggcctctggggcggggctccttggagggggctcagtcaccccgagagtgcacagtgctatcgtggagcgcctccgggctcggatcgctgtctgccgccaacaccacctgagctgtgaaggacgatatgaacgaggtagggccgagagctcagaccgggaaagagaaagcaccttgcagctcctgagccttgtacagcatggccagggggcaaggaaagctggcaaacacaccaaggccaccgccactgctgccaccactacagcccctccaccgccccctgctgcccctcctgcggcctcccaagcagcagcaacagcagccccaccgcccccaccagactatcaccatcaccaccagcagcacctgctgaacagtagcaataatggtggcagtggtgggataaacggagagcagcagccgcccgcttcaaccccaggggaccagaggaactcagccctgattgcgctccagggttccttgaaaagaaaacaggtagttaacctatctcctgccaacagcaagcgacccaatggctttgtggacaactcatttcttgatatcaaaagaattcgtgttggggagaatctctctgcaggacaaggtggcctccaaataaacaatggacaaagtcagattatgtcagggaccttgcctatgagccaagcacccctgcgaaagactaacactctgccatcccatacacattctcctggcaatggcctgtttaacatgggcttaaaggaggtaaagaaggagccaggagagactctgtcttgcagtaagcacatggatggccaaatgacccaagagaatatttttcctaataggtacggagacgaccctggagaacaactgatggatcctgagctgcaggaactgttcaatgaactgaccaacatatctgtgcctcccatgagtgaccttgaactggagaacatgatcaatgccaccataaagcaggatgacccatttaacattgacttgggtcagcaaagccagaggagcacacctaggccctccttacccatggagaaaatagtgatcaaaagtgaatactcaccgggcttgactcagggcccctcaggctctcctcagctgaggcccccatcagctggccccgcattctccatggccaactctgccctctccacttcgtctccaatcccttcagtccctcagagccaggctcagcctcagacaggctccggagcaagccgggccttgccaagctggcaggaagtatcccatgcccagcagctcaaacagatagctgctaatcgtcagcagcatgcccggatgcagcagcaccagcagcagcaccagcctaccaactggtcagccttgccctcttctgctggaccatcaccaggtccatttgggcaggagaaaatccccagcccttcttttggtcagcagacattcagcccacagagctcccccatgcctggggtagctggcggcagcggccagtcgaaagtaatggctaactacatgtacaaggccggcccctcagcccagggtgggcacctagatgtcctcatgcagcaaaagcctcaggatctcagtcgaagttttattaacaacccgcacccagccatggagccccgtcagggcaacaccaagcctttgtttcattttaactcagatcaagcgaaccagcagatgccttctgttttgccttcccagaacaagccttctctcctacactacacccaacagcaacagcagcaacagcagcagcagcagcagcagcagcagcagcagcagcagcaacagcagcagcagcagcaacagcaacagcaacagcaacagcagagttcaatttcagctcaacaacagcaacagcagcagagctcaatttcagcccaacagcagcagcagcagcaacaacagcagcagcagcagcaacaacaacagcaacaacagcagcagcagcagcagcaacaaccatcttctcagcctgcccaatctctaccaagccagcctttgctaaggtcacctttgccacttcagcaaaagctcctacttcagcaaatgcagaatcagcccattgcaggaatgggataccaagtctcccaacaacagagacaggatcaacactctgtggtaggccagaacacaggccccagtccaagtcctaacccctgctcaaatccaaacactggaagtggttacatgaactcccagcaatcactgttgaatcagcaattgatgggaaagaagcagactctacagaggcagatcatggagcagaaacagcaacttcttctccagcagcagatgctggctgacgcggagaaaattgctccacaagatcagataaaccgacatttgtcaaggccacctccagattataaagaccaaagaagaaatgtgggcaatatgcaaccaactgctcagtattctggtggctcatccacaataagcttaaactctaaccaggctttggcaaacccagtttcaacacacaccattttaactcccaattccagcctcctgtctacttctcacgggacaagaatgccatcattatctacagcagttcagaatatggggatgtatggaaatctgccttgtaatcaacctaacacatacagtgtcacttcaggaatgaatcaattgacccaacagagaaacccaaagcaattgttagcaaatcaaaacaaccctatgatgccacggccacctaccttagggccaagtaataataacaatgtagccacttttggagctggatctgttggtaattcacaacaattgagaccaaatttaacccatagtatggcaagcatgccaccacagagaacatcaaacgtaatgatcacatccaacacaactgcaccaaactgggcctctcaagaaggaacaagcaaacagcaagaagccctgacgtctgcaggagtccgcttccccacaggtacacctgcagcctataccccaaatcagtcactgcaacaggcagtaggtagccagcaattttcccagagggcagtggctcctcctaaccagttaacaccagcagtgcaaatgagacccatgaaccaaatgagccaaacactaaatgggcaaaccatgggtcccctcaggggtctgaatctcagacccaatcagctaagcacacagattttgcctaatttgaatcagtcaggaacagggttgaatcagtcgaggacgggcatcaaccagccaccatccctgacgcccagcaattttccttcacccaaccaaagttccagggcttttcaaggaactgaccacagcagtgacttagcttttgacttcctcagccaacaaaatgataacatgggccctgccctaaacagtgatgctgatttcattgattctttattgaagacagagcctggtaatgatgactggatgaaagacatcaatcttgatgaaatcttggggaacaattcctaaagaagaaagggaagacaatttacaaactccaagcactaaaaggcagtatattacagaaactctgtagaggctgaactgttgatgttcaggtggactacatgaagataacatgcttaaaaatggaaagcagaaagtaactgcagtgatgaacattttggtccaaattcttgttttaaatcttacacctgaaagtaaaatattgggatcacttttccctgtctaaactccaggatacagtatccaatttatccaaacagaactgtggtgtcaatgtgtaattaattgtgtaaaatagccttcccaagtttctttttccctggaaaataaaaaaggtaatagaacttgtagtttatttaaaccccatgtcatgaggaggtactagttccaagcaacaaactccttaatttgctctaatagataggtatggtttaatctttccattgtgtcttttcatttaattttcctgaagcttgcaggatagattgaaatgttataggtttgtttggagtaaccaaacagtatgcaaattaagaaaaagccagagaacctagaaaacatccagtggattacagaatttcttccccatattcactcctcacttttacaattttcccacaatcctctacttcagtgggatgctgtgtctagtgattaaacaaaaatatagagctgtgcaatttgattttggcttccacaacgaatatctgaatccattccaaatgaaattttagatataacaaagacttgtcctaatcatactgaaatattggtgcacacctctctgcattagatttcacttttttaaaaaacccagtggacattgctataaataagatttatttggctacaaataacctgggatgttgcttattatgattgatgcctgctggtttgttcccaagctgagtgaaattgaacctcgtcctccctactcattttgatgactgaggctggtttataagaaaaggaagtttggagaagaaaaccgagattagaaaatatcatgttttggttggagataagaaccagggatggcaagtaccagtgtgtacaaatgtatttcacggagtttgaaggaacgcataatcaagagggaaaacaatttgtccttcattggacgtattatttggatttgggtgagcaacaaaatggaatgtggtctgttaggagcattctgtttgttcttttgtccctgatgtgatgaatcattgccacatgctagatggactcttcatatccaggttttgtccctcagggctgagcactgtattaaagagtttttgttgagtcatttaaccttagtgtccacatccagatcagctgtaaaatggggaagacgtgtgctgatttggaatgaatgcaaaatatcactatcattttcctaattacagaggagcaaaggttatcttcagccctttcagttctatgctcacatattcaaatatcaaatgtaatttagctgaagttatttaataatcaagtctttcaatatctgttcaaagaaaaagaacacactttgaaaattctgcaaagctgtctcccagtctttaaaatgtctggaagcactctccttctttacaataccaacatcactggcccagaatcttccctgtgctagtttgtaaatataaataaattacttgttttgtaaacttttgtaaagaatattttggtagaaatacttcaaacatattctttgggttatatttatacatatgtgaaataaatatactatcaaaaggttatattttatacaaaaagtaaattgctaccttttgtatgctaatatgcaaagttttgtataatatgatggtttatttttagctctacacttaaaccataggtggttgagtgggaacttttgaaaactatcaagaggcttgttagacaaatttatattctgaaacctcaataagaaagcattccaggtttcaatccttgttttttgtcctgctcccaaattcttttttaaacccatagttcttgtgtcttatttgattcttctgctgtgcacattgtattggtccttgttgcatgtagtctactgtgtgttttccgattttataaggcagcatttctccatacaaaaagaaaaaaaatgatgtacatataaacgcttttgttgtatggctcctccatgttactgtatatatctgccagcacttcccagttacactcctgtgagtcagcttatttttaccctaacataaatagtatgttttgtagtagttatcaaatttaagagataaagcaatcagaatgtttggattttcttctatcttaatgtgaatttcataattaatgtctatttattcagctattcattaaaatacaggattctttgggaaaa

SEQ ID NO: 836 - RNA, 6844 nt, Homo sapiens
  source 1..6844: mol_type = transcribed RNA
actccgctggcatggaggaggaggaggaggtggaggagcgagaggaggaggaggaggcggcggcggcggcggcggcgagcagttgatcattgtgatggtggcaggagcagcggcggcagcggcagcccagccgagcgttaggtgctgctctctgcgcggcgttttgcaaaggacttcaccgatctacttttgcagtcgcctcggactgtccatgtgtttacttcccccagcccgaggattcgatatctaggttcctgtgaaatgcaactgagcagccaaagtactttgagaacacggggcggcataaacaccaaaacttttttgtggaaggaaaatgcaataagcaagcttgccgttttccgatgcggtgtggagtgagtgtgtgtcgcgcgtgtccgcactggaggcatatgcttgtgtgtgtacatggggtgtgtttttcggtatgtagggagaaaatgcttgccaaccaccggaaatctcctggaatttattagaaaataatggattataaaaagaaggcaagcaaggagcggatctccccttgagttgcaacccgatttgctgctggctcagtttgttgtgattctttttgttgataggtgtctgatggtattccgataacgttccccccttttcttccccttgagcttttacagtttaaaaaaaggaaacaaaaaccaccccaaaatctccccccccgtttttttcgccccgtcgggatcgccgtttccatccatgtgcttgcgtctcccccgcgttccacttaaactattttaatccttggacccaaggaggaggctgataggggggtggataaaaaaagttcttccaaaatagtgtgcccggggagcaggatgggggatttcgcagcccccgctgctgccgcgaatggcagtagtatttgcatcaacagtagcctgaacagcagcctcggcggggccgggatcggtgtgaataatactcccaatagtactcccgctgctccgagtagcaatcacccggcagccggtggatgcggcggctccgggggccccggcggcggttcggcggccgttcccaagcacagcaccgtggtggagcggctccgccagcgcatcgagggctgccgtcggcaccacgtcaactgcgagaacaggtaccagcaggctcaggtggagcagctggagctggagcgccgggacaccgtgagcctctaccagcggaccctggagcagagggccaagaaatcgggcgccggcaccggcaaacagcagcacccgagcaaaccccagcaagatgcggaggctgcctcggcggagcagaggaaccacacgctgatcatgctacaagagactgtgaaaaggaagttggaaggagctcgatcaccacttaatggagaccagcagaatggtgcttgtgatgggaatttttctccgactagcaaacgaattcgaaaggacatttctgcggggatggaagccatcaacaatttgcccagtaacatgccactgccttcagcttctcctcttcaccaacttgacctgaaaccttctttgcccttgcagaacagtggaactcacactcctgggcttctagaagatctaagtaagaatggtaggctccctgagattaaacttcctgtcaacggttgcagtgacctggaggatagcttcaccatcttgcagagcaaagacctcaaacaagaacctctcgatgaccctacttgcatagacacatcagaaacatctctttcaaatcagaacaagctgttctcagacattaatctgaatgatcaggagtggcaagaattaatagatgaattggccaacacggttcctgaggatgacatacaggacctgttcaacgaagactttgaagagaagaaggagccagaattctcgcagccagcaactgagacccctctctcccaggagagtgcgagcgtgaagagcgacccctctcactctcccttcgcacatgtctccatgggatctccccaggcgaggccttcttcttctggtcctcccttttctactgtctccacggccactagtttaccttctgttgccagcactcccgcagctccaaaccctgcaagctcaccagcaaactgtgctgtccagtcccctcaaactccaaaccaagcccacactccaggccaagctccacctcggcctggaaatggttatctcctgaatccggcagcagtgacagtggccggttcagcgtcagggcctgtggctgtgcccagctctgacatgtctccagcagaacagctcaaacagatggctgcacagcagcaacaaagggccaaactcatgcagcagaaacagcaacagcaacagcagcagcagcagcagcagcagcagcagcagcagcagcagcagcagcagcagcagcaacagcactcaaatcagacttcaaattggtctcccttaggacctccctctagtccatatggagcagcttttactgcagaaaaaccaaatagcccaatgatgtacccccaagcctttaacaaccaaaaccctatagtgcctccaatggcaaacaacctgcagaagacaacaatgaataactacctccctcagaatcacatgaatatgatcaatcagcagccaaataacttgggtacaaactccttaaacaaacagcacaatattctgacttatggcaacactaaacccctgacccacttcaatgcagacctgagtcagaggatgacaccaccagtggccaaccccaacaaaaaccccttgatgccgtatatccagcagcagcaacagcagcagcaacagcaacagcagcagcagcagcagcagcagccgccacctccacagctccaggcccccagggcacacctgagcgaagaccagaaacgcctgcttctcatgaagcagaaaggagtgatgaatcagcccatggcttacgctgcacttccatcccacggtcaggagcagcatccagttggacttccccgaaccacaggccccatgcagtcctccgtgcccccaggctcaggtggcatggtctcaggagccagtcccgcaggccccggcttcctgggcagccagccccaagcagccatcatgaagcagatgctcattgatcagcgggcccagttgatagagcagcagaagcaacagttcctgcgggagcaaaggcagcagcagcagcagcagcagcagcagattttggcggaacagcagttgcagcaatcacatctaccccggcagcacctccagccacagcggaatccatacccagtgcagcaggtcaatcagtttcaaggttctccccaggatatagcagccgtaagaagccaagcagccctccagagcatgcgaacgtcacggctgatggcacagaacgcaggcatgatgggaataggaccctcccagaaccctgggacgatggccaccgcagctgcgcagtcggagatgggactggccccttatagcaccacgcctaccagccaaccaggaatgtacaatatgagcacaggcatgacccaaatgttgcagcatccaaaccaaagtggcatgagcatcacacataaccaagcccagggaccgaggcaacctgcctctgggcagggggttggaatggtgagtggctttggtcagagcatgctggtgaactcagccattacccagcaacatccacagatgaaagggccagtaggccaggccttgcctaggccccaagcccctccaaggctgcagagccttatgggaacagtccagcaaggagcacaaagctggcaacagaggagcttgcagggcatgcctgggaggactagtggagaattgggaccattcaacaatggcgccagctaccctcttcaagctgggcagccgagactgaccaagcagcacttcccacagggactgagccagtcagtcgtggatgctaacacgggcacagtgaggaccctcaacccagctgccatgggtcggcagatgatgccatcgctcccggggcagcaaggcaccagccaggcgaggccaatggtcatgtctggcctgagccagggagtcccaggcatgccagcgttcagccagcccccagcacagcagcagatacccagtggcagctttgctccaagcagccagagccaagcctatgagcggaatgcccctcaggacgtgtcatacaattacagtggcgacggagctgggggttccttccctggcctcccggacggtgcagaccttgtggactccatcatcaaaggcgggccaggggacgagtggatgcaggagcttgatgaattgtttggtaacccctaatcaagagaggccccaagatccacaactcgagtggttaaagcttaaaaagtgaaaaagaaacaggatgttgacccatccttgttttttgtttttttgacccacgtaaactgagcaaaactgcagctggctgacaatggaagatccaggtgccaatccacagccccaccaggcctcatttcacctgattttcacacagcaatcgagatgagacgccatgcagatcccggctgcgagagagggagacacccggaggagcaggtgggaagatgaagccggccagagcccctctgcccagcatgccctgtgatcgcctggcccagcaggagctgcttcagccgagagggactattacccaagagaggtatcctcagcccctcctgccccaggtcgggagacagcagctttggagacacaaaagagacagagcctcagccagggagagtgagtcccccagaagaggctgggtggttgcacaggccaggtgcacaggttggaaatgcactgaactctgggtgccgagagatgtaaggctttgagacatgctactgaatttggagggcaggcacgaagaacagtgagattgtcaaaaggagacaaccacagatcctacaggactgtctgtctcctgccccatgatgaccctcaggaattgcaaaggctctgctgtcacaaggagagcaggctgagtttggagcagggtccatccggcagtcctgggacggcttccctctgctggtgcccctggtggcagtccctccaggtggggctggagcctgctggcgcccaatacaaaacccatacatccaggtgggtcacatctacttctggcggccgcagggcagggaaacccctactggaccctgtgtgtctgccagcctggagcctttgtctccagccctgcctttattcctccttgcctccacaccagcctccccttgcttctccttacagactatccaagaagtgaagcttatgtctttagggagccttgggcagagtccacataaatgcaggaagaacttagacaatgcctgaaatgcaaaggcgacactggagtcttctttctctaacgtgtagcgttgaatgaatatctgcctggaaccaagagggctgctctgatgtttgggagtcggttttttgtgagccacatctgatatttctgatatccccaggaaggagtggcctggaggtcactggttcaggctccctttgggcgaaatcctgggagtgatgctctaaaaatccacctttcccatcatccctactcatcagaaagacaaatataaaatcccagagaggtggaggagctaaaaaagcaattgctccaccttacaaatttggatagaaaggagatgtagtttatttcatatgggcaaagtagtcctcttccaaagtcctgtacagttgttctctgcaattgacgcacatctgccctaagcgaaatctgtcagaaggaatcaacaaggctccttgcctcccctcccaatcccccttttggaggacttgtggcttcggtgtcgtcctaagtgagagtggcgtgtgcttttttcctgtcccctcctccctccgtgtcctagacgctggctgccttctgtgcactcccaggcagatcactacggaagagtcggagcctgtggggttggactggccacactcagtcctgagaaggcgagttgccatggaaagctgggggcagaggtgtttttggagaggaggcggcaggcaaacattgcctttgacttgctctccgcgtacccggggttgtagagctgctcaggaaggggcaggatgtaaggccagaggtgcctggtgggtgagaagcccaggcaggggctgggcgccctctccgaagaggtggcagcagggtgaccctgaactccccaaatggggagtgatgccactggggaaactgagtggatcaaagagatgaaaccaaaaaaaagcaaacaaacaaatgagaagacacaaaacataattaccttttcctgaaaggtacaggaaataaatatataagcaatgatgagaaactggaggtggctaatggaagtgagacagacaggggtggggggctccattatcttttaaaagcttcctccaaatgctcagtactgggaccaactaataggtagattttaatatggtggttttgttttggttttgtttttactacggtgctgatgtatatgtaatgtctaaaaaaagttatttgtacataagtttttacaatactgcagatatcactgggtctactatctgtaaaaaatatacatataaatatatatatactgtttgtttaaaatagagtatttttatttcattccttaactcatcatcacagcagtggtattgcacttcagatgacatctaattactaatttgtactgtatgacctctggcaacttgctccattttattcagatttttctagttttctgtttttactttgtacattgagcattgcttatttccttttaagaaatgtacagaacgctgaaatgtagaaatgaagtgatgttgacataccacttttaaagaaaacaaaaacaaaaataaaagattatctgaatcaa

SEQ ID NO: 837 - RNA, 5748 nt, Homo sapiens
  source 1..5748: mol_type = transcribed RNA
gtactctgggtgactcagagagggaagagattcagccagcacactcctcgcgagcaagcattactctactgactggcagagacaggagaggtagatgtccacgcccacagaccctggtgcgatgccccacccagggccttcgccggggcctgggccttcccctgggccaattcttgggcctagtccaggaccaggaccatccccaggttccgtccacagcatgatggggccaagtcctggacctccaagtgtctcccatcctatgccgacgatggggtccacagacttcccacaggaaggcatgcatcaaatgcataagcccatcgatggtatacatgacaaggggattgtagaagacatccattgtggatccatgaagggcactggtatgcgaccacctcacccaggcatgggccctccccagagtccaatggatcaacacagccaaggttatatgtcaccacacccatctccattaggagccccagagcacgtctccagccctatgtctggaggaggcccaactccacctcagatgccaccaagccagccgggggccctcatcccaggtgatccgcaggccatgagccagcccaacagaggtccctcacctttcagtcctgtccagctgcatcagcttcgagctcagattttagcttataaaatgctggcccgaggccagcccctccccgaaacgctgcagcttgcagtccaggggaaaaggacgttgcctggcttgcagcaacaacagcagcagcaacagcagcagcagcagcagcagcagcagcagcagcagcagcaacagcagccgcagcagcagccgccgcaaccacagacgcagcaacaacagcagccggcccttgttaactacaacagaccatctggcccggggccggagctgagcggcccgagcaccccgcagaagctgccggtgcccgcgcccggcggccggccctcgcccgcgccccccgcagccgcgcagccgcccgcggccgcagtgcccgggccctcagtgccgcagccggccccggggcagccctcgcccgtcctccagctgcagcagaagcagagccgcatcagccccatccagaaaccgcaaggcctggaccccgtggaaattctgcaagagcgggaatacagacttcaggcccgcatagctcataggatacaagaactggaaaatctgcctggctctttgccaccagatttaagaaccaaagcaaccgtggaactaaaagcacttcggttactcaatttccagcgtcagctgagacaggaggtggtggcctgcatgcgcagggacacgaccctggagacggctctcaactccaaagcatacaaacggagcaagcgccagactctgagagaagctcgcatgaccgagaagctggagaagcagcagaagattgagcaggagaggaaacgccgtcagaaacaccaggaatacctgaacagtattttgcaacatgcaaaagattttaaggaatatcatcggtctgtggccggaaagatccagaagctctccaaagcagtggcaacttggcatgccaacactgaaagagagcagaagaaggagacagagcggattgaaaaggagagaatgcggcgactgatggctgaagatgaggagggttatagaaaactgattgatcaaaagaaagacaggcgtttagcttaccttttgcagcagaccgatgagtatgtagccaatctgaccaatctggtttgggagcacaagcaagcccaggcagccaaagagaagaagaagaggaggaggaggaagaagaaggctgaggagaatgcagagggtggggagtctgccctgggaccggatggagagcccatagatgagagcagccagatgagtgacctccctgtcaaagtgactcacacagaaaccggcaaggttctgttcggaccagaagcacccaaagcaagtcagctggacgcctggctggaaatgaatcctggttatgaagttgcccctagatctgacagtgaagagagtgattctgattatgaggaagaggatgaggaagaagagtccagtaggcaggaaaccgaagagaaaatactcctggatccaaatagcgaagaagtttctgagaaggatgctaagcagatcattgagacagctaagcaagacgtggatgatgaatacagcatgcagtacagtgccaggggctcccagtcctactacaccgtggctcatgccatctcggagagggtggagaaacagtctgccctcctaattaatgggaccctaaagcattaccagctccagggcctggaatggatggtttccctgtataataacaacttgaacggaatcttagccgatgaaatggggcttggaaagaccatacagaccattgcactcatcacttatctgatggagcacaaaagactcaatggcccctatctcatcattgttcccctttcgactctatctaactggacatatgaatttgacaaatgggctccttctgtggtgaagatttcttacaagggtactcctgccatgcgtcgctcccttgtcccccagctacggagtggcaaattcaatgtcctcttgactacttatgagtatattataaaagacaagcacattcttgcaaagattcggtggaaatacatgatagtggacgaaggccaccgaatgaagaatcaccactgcaagctgactcaggtcttgaacactcactatgtggcccccagaaggatcctcttgactgggaccccgctgcagaataagctccctgaactctgggccctcctcaacttcctcctcccaacaatttttaagagctgcagcacatttgaacaatggttcaatgctccatttgccatgactggtgaaagggtggacttaaatgaagaagaaactatattgatcatcaggcgtctacataaggtgttaagaccatttttactaaggagactgaagaaagaagttgaatcccagcttcccgaaaaagtggaatatgtgatcaagtgtgacatgtcagctctgcagaagattctgtatcgccatatgcaagccaaggggatccttctcacagatggttctgagaaagataagaaggggaaaggaggtgctaagacacttatgaacactattatgcagttgagaaaaatctgcaaccacccatatatgtttcagcacattgaggaatcctttgctgaacacctaggctattcaaatggggtcatcaatggggctgaactgtatcgggcctcagggaagtttgagctgcttgatcgtattctgccaaaattgagagcgactaatcaccgagtgctgcttttctgccagatgacatctctcatgaccatcatggaggattattttgcttttcggaacttcctttacctacgccttgatggcaccaccaagtctgaagatcgtgctgctttgctgaagaaattcaatgaacctggatcccagtatttcattttcttgctgagcacaagagctggtggcctgggcttaaatcttcaggcagctgatacagtggtcatctttgacagcgactggaatcctcatcaggatctgcaggcccaagaccgagctcaccgcatcgggcagcagaacgaggtccgggtactgaggctctgtaccgtgaacagcgtggaggaaaagatcctcgcggccgcaaaatacaagctgaacgtggatcagaaagtgatccaggcgggcatgtttgaccaaaagtcttcaagccacgagcggagggcattcctgcaggccatcttggagcatgaggaggaaaatgaggaagaagatgaagtaccggacgatgagactctgaaccaaatgattgctcgacgagaagaagaatttgacctttttatgcggatggacatggaccggcggagggaagatgcccggaacccgaaacggaagccccgtttaatggaggaggatgagctgccctcctggatcattaaggatgacgctgaagtagaaaggctcacctgtgaagaagaggaggagaaaatatttgggagggggtcccgccagcgccgtgacgtggactacagtgacgccctcacggagaagcagtggctaagggccatcgaagacggcaatttggaggaaatggaagaggaagtacggcttaagaagcgaaaaagacgaagaaatgtggataaagatcctgcaaaagaagatgtggaaaaagctaagaagagaagaggccgccctcccgctgagaaactgtcaccaaatccccccaaactgacaaagcagatgaacgctatcatcgatactgtgataaactacaaagataggtgtaacgtggagaaggtgcccagtaattctcagttggaaatagaaggaaacagttcagggcgacagctcagtgaagtcttcattcagttaccttcaaggaaagaattaccagaatactatgaattaattaggaagccagtggatttcaaaaaaataaaggaaaggattcgtaatcataagtaccggagcctaggcgacctggagaaggatgtcatgcttctctgtcacaacgctcagacgttcaacctggagggatcccagatctatgaagactccatcgtcttacagtcagtgtttaagagtgcccggcagaaaattgccaaagaggaagagagtgaggatgaaagcaatgaagaggaggaagaggaagatgaagaagagtcagagtccgaggcaaaatcagtcaaggtgaaaattaagctcaataaaaaagatgacaaaggccgggacaaagggaaaggcaagaaaaggccaaatcgaggaaaagccaaacctgtagtgagcgattttgacagcgatgaggagcaggatgaacgtgaacagtcagaaggaagtgggacggatgatgagtgatcagtatggacctttttccttggtagaactgaattccttcctcccctgtctcatttctacccagtgagttcatttgtcatataggcactgggttgtttctatatcatcatcgtctataaactagctttaggatagtgccagacaaacatatgatatcatggtgtaaaaaacacacacatacacaaatatttgtaacatattgtgaccaaatgggcctcaaagattcagattgaaacaaacaaaaagcttttgatggaaaatatgtgggtggatagtatatttctatgggtgggtctaatttggtaacggtttgattgtgcctggttttatcacctgttcagatgagaagatttttgtcttttgtagcactgataaccaggagaagccattaaaagccactggttattttatttttcatcaggcaattttcgaggtttttatttgttcggtattgtttttttacactgtggtacatataagcaactttaataggtgataaatgtacagtagttagatttcacctgcatatacatttttccattttatgctctatgatctgaacaaaagctttttgaattgtataagatttatgtctactgtaaacattgcttaatttttttgctcttgatttaaaaaaaagttttgttgaaagcgctattgaatattgcaatctatatagtgtattggatggcttcttttgtcaccctgatctcctatgttaccaatgtgtatcgtctccttctccctaaagtgtacttaatctttgctttctttgcacaatgtctttggttgcaagtcataagcctgaggcaaataaaattccagtaatttcgaagaatgtggtgttggtgctttcctaataaagaaataatttagcttga

SEQ ID NO: 838 - RNA, 6701 nt, Homo sapiens
  source 1..6701: mol_type = transcribed RNA
agtggttgtgtacggtccgcagcggcaggtgaagtctagcagaggacgcggccaggcgattcggtgaagcgattcctgcaggcgttggttcccctctttgacctggaagcctggagccagaggacttttggtggctgaggccttagctacctggcttacacattaaggaggacacagatttgcttgctgtctgtctgtcaaggcctggctcagctaaggacctgttaacatttctagagaagaaaacagcattaccatggatttgaatttgttgaaatgagcagtcgtaaatcaaagagtaacagcttaattcacacagagtgcctttcacaggtacaaagaattttacgtgaaagattttgtcgtcagagtccacatagtaacctatttggagtgcaagtacaatacaaacacttaagtgagctgctgaaaagaactgctctccatggagagagtaactctgtccttattatcggaccccgaggatcaggaaaaactatgttaataaatcatgctttgaaagaactcatggaaatagaagaagtgagtgaaaatgtattacaagttcacttaaatggactgctgcagatcaatgacaaaatcgccctaaaggaaatcacaaggcagttaaatctggaaaatgtagttggagataaagtttttggaagctttgctgaaaacctttcatttcttctggaagctttaaaaaaaggtgaccgaactagcagttgcccagtgatcttcatattagatgaatttgatctttttgctcatcataaaaaccaaacacttctctataatctttttgacatttctcagtctgcacagaccccaatagcagttattggtcttacatgtagattggatattttggaactcttagaaaaaagagtgaagtcaagattttctcaccggcagatacacttaatgaattcatttggttttccacagtatgttaaaatatttaaagaacagttatctctacctgcagagtttccagacaaggtttttgctgagaagtggaatgaaaatgttcagtatctctcagaagatagaagtgtgcaagaagtactacagaagcatttcaatatcagcaaaaacctgcggtcattacacatgctattgatgcttgctttaaatcgagtaacagcatcgcacccatttatgactgccgtagatctaatggaagcaagccaactgtgtagcatggactcgaaagcaaatattgtacatggtctatcagtcttggaaatctgtcttataatagcaatgaaacatttaaatgacatctatgaggaagagccatttaattttcaaatggtctataatgagtttcagaagtttgttcaaaggaaagcacattccgtttataattttgaaaaacctgttgtcatgaaggcttttgaacacttgcagcaattagaattaataaagcccatggaaagaacttcaggaaattcacagagagagtaccagctgatgaaactgcttttggataatactcaaattatgaatgctctgcagaaatatcccaactgtcctacagatgtgaggcagtgggcaacatcctcactaagctggttatgaatataaccagtgacttcaactttggcatttcattcatacttctgtagagaacggaaaactattgtccattaacatgatatgctaaacattctataaacattcttgtatttatgtgagacttgcccatctactgtcttggctgtgtcttgccttttaatcatgaacagttacatgatttataatttcactgattgagattactttgtaagtagctgttcagaagaataaaatatgactgttttagggactagaccatgtgcttttttaacacttatatatataatggtctatttgaagagctcacttcaacctaacagctagatgtctttacaaaccttaaaccaaaggagtaaaaaaaacaatggtaagcactgaagtataataagtaacctttggtacagcaggtttgctgcagtgtttttttctgtccacatgcaaattttggattctatcccagacccaggttttctagttcagaagactaaccagcttagtcagaagatggttccatggaagaaaaaggccaaggagtttgaagatttttcttctagacatctcaaaatgtggtactcataccatccacatcagaatcccttgtaggattttctaaaattacagattgttgagcctaccataggtcaaaaggactggaattttccttcttaacaagtatagtcatggcaccacgtaacattttggtcaatgacattgtataaagggtggtctcataagattataccatatttttactgtaccttttctatgtctaaatatacaaatgttttaccattgtgttacagttgcctacagtatgattacagtaacattctgtacagtgctatagctgaagagtaataggctaggctatctgtatagcctaagtgtgtaacaggctatatacatatcatcagggtctgtgtaagtatactctgtgatgttcatacagtgatgaaatcacccaaagacacatttctcagaacgtagccccatcatgaagtgacgtgactaccagagatttctggaaaagcactcccaaaagtaatgagatgtgtatggcaatgttaactgaacctgtttgtattaaaaagtaaatccctatgaggaatgtggaaatgtccgtcaaagcattgtcttttaagtaagttccaagatccatgaattaacagaggcatatatttaaaatgaaatttaatgagcacttagtgacttcatttgttcaagaatatttgatttcctattgtgtgcatgggaggtttacaaaagacagactgtccctatgcttgtgcagcttacaatctatttaactattagaggccctgtgagatgtaggcagttatttacagatgagaaaactaacacagcagtggcaatgctgggaatggccaacaggcttggaattcaactcagtttagcaccaaagccagtgctattaagacctgaagttcaacagtggattccttaccaaatagtttttaaagtatgctctaaggaacaatgttttaatgaaatcttggatacaaagtggaataaaaggtttctgagcataaagtagctcttcagtagttacaacctattcttttgcatacatagcctttccttccctgcaaaaagttaagcctgctaagtattcagatccctgtcatttacttctcagcagtctcattcaagctaaggcttgcatactcaatctgtgccgtagtctacacatttttaggggatatttcaccaaaatacttgacatggtaacatcactattatatactagaagcaagaattttacacttatgctctaagtgatccttttaaaaattttctgaactatttgaggaaagtattatttgtcttaaagggtaacagcctcatgaaatgacttgaggattccaatttcttattagcttaagatgtcacttaaaagctgacagccctcatctgtctcattggctacataagagctgcagaagatccatcaataaccaagtataaagaaagattttaagactaagtaccaattgaggtaaacatgaaaccgttataaagcaaattaaaaaaaaatacattaggaaaagttacacaaatgaagtgtacgcctattatattcccaaggcatttttgtggggaggaacagtgctgcttgttggcctttccatattccctcatacaaaaatgctaaaatctattcgcaagagttttgagctaacttcgtctcttaaattgctttaattgtcatcaataaaaacaaatatgaaaaaccctagtttaaaaagcggttcaagaataatgtaaacttatacatatagcttattttcttcatttactagaggaggaaaaatagaaccaaaaaatgcatgaactcctgcttttcaatctgattacctcaaactgaaaagcaggtgaaaggaggaatatttcagtgtgtttttacatctgaatccaagggatccaagtggcccagcagaaacggaattcttgttaaaatgactgattctcgtgcatgtgaaaggctctggggaatgaatacctgtttggtccaaacttactgtatcataatgctgtatatgttgaaaacgtaatacctgttaatgtcctaatgaatcacgttttgcagaaaacaccgtaagaaacacttcagtctttctgtagtttccatgcatatttcaccatggttcgcactctgatcctcatctggtttagaaagcaattcagtttctttcaaaccaccataacctaagtgctgccccatccttcacctttaccctagaaaatctgagaatccattggtgtgtactgtgtgacacaatgccaacaagcctctggtttctaatactggcaggaccaacacacatactttagtgggaatataatctgtttagacgataatagagggaaatgccataattaacaaatctcccttcactcaccactatcctcattcttgcagttgtcaaggtgtaagcctcactgtaagttacaaagctaccactcccctctttaagaacacatagcttaggattgccttggcgatgtgggctcttttttggttccatatgaacttaagtagttttttccaattctgtgaagaaagtcattggtagcttgatggggatggcattgaatctgtaaattaccttgggcagtatggccattttcacaatattgattcttcctacccaagagcatggaatgttcttccatttgtttgtatcctcttttatttccttgagcagtagcttgtagttctccttgaagaggtccttcacatcccttgtaagttggattcctaggtattttattctctttgaagcaattgtgaatgggagttcactcatgatttggctctctgtttgtctgttgttggtgtataagaatgcttgtgatttttgtacattgattttgtatcctgagactttgctgaagttgcttatcagcttaaggagattttgggctgagacgatggggttttctagatatacaatcatgtcgtctgcaaacggacaatttgacttcctcttttcctaattgaataccctttatttccttctcctgcctaattgccctggccagaacttccaacactatgttgaatacgagtggtgagagagggcatccctgtcttgtgccagttttcaaagggaatgcttccagtttttgcccattcagtatgatattggctgtgggtttgtcatagatagctcttattattttgaaatacaccccatcaatccctaatttattgagagtttttagcatgaagggttgttgaattttgtcaaaggctttttctgcatctattgagataatcatgtgttttttgtctttggctctgtttatatgctggattacattcattgatttgcgtatattgaaccagccttgcatcccagggatgaagcccacttgatcatggtggataagctttttgatgtgctgctggattcgttttgccagtattttatccagttagaatggcaatcattaaaaagtcaggaaacaacaggtgctggagaggatgtggagaaataggaacactttcacactgttggtgggactgtaaactagttcaaccattgtggaagtcagtgtggcgattcctcagggatctagaactggaaacaccatttgacccagccatcccattactgggtatatacccaaaggactataaatcatgctgctataaagacacatgcacacgtatgtttattgtggcattattcacaatagcaaagacttggaaccaacccaaatgtccaacaatgatagactggattaagaaaacgtggcacatatacaccatggaatactatgcagccataaaaaatgatgagttcatgtcctttgtagggacatggatgaaattggaaatcatcattctcagtaaactatcacaagaacaaaaaaccaaacaccgcatattctcactcataggtgggaattgaacaatgagatcacatggacacaggaaggggaatatcacactctggggactgttgtggggtggggggatgggggagggatagcattaggagatatacctaatgctagatgacgagttagtgggtgcagcgcaccagcatggcacatgtatacctatgtaactaacctgcacaatgtgcacatgtaccctaaaacttaaagtataaaaaaaaaaaaaaacatagctaaagaaaaactgcatatgcaaatcataccgtattcatttttttatttaacttggggatggaatggggatagcatacattttatttgtacaatatttaacaatcacttatccaaggtggggttttatggggattttaagctttctgttaaatacttgcagaaaaaatagcaagtacgatttgacagtagtacaataacctgtgcccaaaacacaagaaatacagagtaaagcgaaaataactgcttaccaatattctgagaggtaacaaatgggatatgggttgagactgcataaaaaacgtactgctggttgaatatctgaggtaaatgatgttcaatcaagatgctacttgtatcattttgcccataaatggataaataattttatgcatatcataccaaatgttcctaaaaagtaatctttcaaaaaagtataaaagagaaactggaaagta

SEQ ID NO: 839 - RNA, 5540 nt, Homo sapiens
  source 1..5540: mol_type = transcribed RNA
attcgcctcacaaacaaccacagaaccacaagtgcggtgcaaactttctccaggaggacagcaagaagtctctggtttttaaatggttaatctccgcaggtcactaccagccaccgagaccaacagagtcatttaaggctgcaagcagtatttacaacagagggtacaagttctatctgaaaaaaaaaggagggactatggcatcaaacagcctcttcagcacagtgacaccatgtcagcaaaacttcttttgggatccgagcaccagccggcgcttcagccccccctccagcagcctgcagcccggcaaaatgagcgacgtgagcccggtggtggctgcgcaacagcagcagcaacagcagcagcagcaacagcagcagcagcagcagcaacagcagcagcagcagcaggaggcggcggcggcggctgcggcggcggcggcggctgcggcggcggcagctgcagtgccccggttgcggccgccccacgacaaccgcaccatggtggagatcatcgccgaccacccggccgaactcgtccgcaccgacagccccaacttcctgtgctcggtgctgccctcgcactggcgctgcaacaagaccctgcccgtggccttcaaggtggtagccctcggagaggtaccagatgggactgtggttactgtcatggcgggtaacgatgaaaattattctgctgagctccggaatgcctctgctgttatgaaaaaccaagtagcaaggttcaacgatctgagatttgtgggccggagtggacgaggcaagagtttcaccttgaccataaccgtcttcacaaatcctccccaagtagctacctatcacagagcaattaaagttacagtagatggacctcgggaacccagaaggcacagacagaagcttgatgactctaaacctagtttgttctctgaccgcctcagtgatttagggcgcattcctcatcccagtatgagagtaggtgtcccgcctcagaacccacggccctccctgaactctgcaccaagtccttttaatccacaaggacagagtcagattacagaccccaggcaggcacagtcttccccgccgtggtcctatgaccagtcttacccctcctacctgagccagatgacgtccccgtccatccactctaccaccccgctgtcttccacacggggcactgggcttcctgccatcaccgatgtgcctaggcgcatttcagatgatgacactgccacctctgacttctgcctctggccttccactctcagtaagaagagccaggcaggtgcttcagaactgggccctttttcagaccccaggcagttcccaagcatttcatccctcactgagagccgcttctccaacccacgaatgcactatccagccacctttacttacaccccgccagtcacctcaggcatgtccctcggtatgtccgccaccactcactaccacacctacctgccaccaccctaccccggctcttcccaaagccagagtggacccttccagaccagcagcactccatatctctactatggcacttcgtcaggatcctatcagtttcccatggtgccggggggagaccggtctccttccagaatgcttccgccatgcaccaccacctcgaatggcagcacgctattaaatccaaatttgcctaaccagaatgatggtgttgacgctgatggaagccacagcagttccccaactgttttgaattctagtggcagaatggatgaatctgtttggcgaccatattgaaattcctcagcagtggcccagtggtatctgggggccacatcccacacgtatcaatatatacatatatagagagagtgcatatatatgtatatcgattagctatctacaaagtgcctattttttagaagatttttcattcactcactcagtcatgatcttgcagccataagagggtagatattgagaagcagaaggctcaagagagacaattgcaatcgagcttcagattgtttactatttaagatgtacttttacaaaggaacaaagaagggaaaaggtatttttgtttttgttgtttggtctgttatcatcaataacctgttcatatgccaattcagagaggtggactccaggttcaggagggagaagagcaaagccgcttcctctctgtgctttgaaacttcacaccctcacggtggcagctgtgtatggaccagtgccctccgcagacagctcacaaaaccagttgaggtgcactaaagggacatgaggtagaatggatgcttccatcacagtaccatcattcagaataactcttccaatttctgctttcagacatgctgcaggtcctcatctgaactgttgggttcgtttttttttttttttttcctgctccaagaaagtgacttcaaaaataactgatcaggatagattattttattttactttttaacactccttctccccttttcccactgaaccaaaaagaaatcccatccctaaaacctgccttctccttttatgcaaaactgaaaatggcaatacattattatagccataatggtatagatagtgattgcgtttggctatgtgttgttttctttttttttaaattatgaatatgtgtaaaatctgaggtaacttgctaacgtgaatggtcatataactttaaagatatatttataattatttaatgacatttggacccttgaaacatttcttagtgtattgatatgttgacttcggtctctaaaagtgctctttattaaataacaaatttcttcagtggtctagagccatatctgaaatattgctaagcaatttcagttcatccaggcacaatgtgattttaaaaaatacttccatctccaaatattttagatatagattgtttttgtgatgtatgaaggaaatgttatgtttagttctttcagatctttgaatgcctctaacacagctttgccttctaaagcggtaattagggatttaaaaaacaacctttagccctttatcagcatgaaatgctggagtgatgtggttttctaatttctttggggtaattatgactcttgtcatattaaaaagacaagcacaagtaaatcattgaactacagaaaaatgttctgtggtttcatagttaagcaaaactctaaatcgccaggcttcatagcaaagacatagtcagctaaaagccgcacatgtggatagagggttcaattatgagacacctagtacaggagagcaaaattgcaccagagattcttaaccaaccagccttaccaaacaacacaacaggggaaccccaatctgccttacccaaggccccactggcagctttccacagaatttgcatttagaggagcagaatgacatcactgtcctttgggagtaggtcctctgaaaaggcagcaggttccagcaggtagctgagctgagaggacatatggcccacggggacctacagacagcctttgacatttgtatttcttacaatggagggccaaggagggcaaggggctgtggagtttggtgtctactagtgtgtatgaatttgagctagagtccttctgtggcatgcactttgaccactcctggcagtcacatggcagatttccaagtgcaaatccttaatccaaacaaggatcatctaatgacaccaccaggccaatccctgctctcctccccgaaaagtcagggtcccttcattggaatcctccacccacccaagcagaatttagcagagatttgccttcaaaccctaacggcccccttgttctctggtccttctcaaacccacctttgtaggccacccagcattgcaggacagcgtgtggggcagctggacctgtgcttcctgcctgggagtctcccttggaattcatcctgactccttctaataaaaatggatgggaaagcaaaacactttgccttctaaaggccgtataccaagtatgcttagataaataagccacttttctattacttaagtaagaaggaagtagtaattgatactatttattgtttgtgtgtggtagcttgaagcacaccactgtccatttatttgtaagtgtaaaatatgtgtgtttgtttcagcagcacttaaaaaagccagtgtctggttacacatttcaattttaattaattgacataaaaatgctaccgccagtgccagctgcatcctatttaattaaaaaggtactatatttgtacattattttttaatgttaaaagggcttttttaagtttacagtacacataccgagtgactttagggatgcttttgtgttgaaatgttactatagtggctgcaggcagcaacccagaaacactttagaagctttttttccttgggaaaaattcaagcacttcttccctccaccctcactccaaccaccccaatgggggtaattcacatttcttagaacaaattctgcccttttttggtctagggattaaaattttgtttttctttctttctttttttttttttttcactgaacccttaatttgcactgggtcatgtgtttgatttgtgatttcaagaccaaagcaaagtcttactactactgtggaaccatgtactagttcctgggaattaaaatagcgtggttctctttgtagcacaaacattgctggaatttgcagtcttttcaatgcagccacatttttatccatttcagttgtctcacaaattttaacccatatcagagttccagaacaggtaccacagctttggttttagattagtggaataacattcagcccagaactgagaaactcaacagattaactatcgtttgctctttagacggtctcactgcctctcacttgccagagccctttcaaaatgagcagagaagtccacaccattagggaccatctgtgataaattcagaagggaggagatgtgtgtacagctttaaggattccctcaattccgaggaaagggactggcccagaatccaggttaatacatggaaacacgaagcattagcaaaagtaataattatacctatggtatttgaaagaacaataataaaagacacttcttccaaaccttgaatttgttgtttttagaaaacgaatgcatttaaaaatattttctatgtgagaattttttagatgtgtgtttacttcatgtttacaaataactgtttgctttttaatgcagtactttgaaatatatcagccaaaaccataacttacaataatttcttaggtattctgaataaaattccatttcttttggatatgctttaccattcttaggtttctgtggaacaaaaatatttgtagcattttgtgtaaatacaagctttcatttttattttttccaattgctattgcccaagaattgctttccatgcacatattgtaaaaattccgctttgtgccacaggtcatgattgtggatgagtttactcttaacttcaaagggactatttgtattgtatgttgcaactgtaaattgaattatttggcatttttctcatgattgtaatattaatttgaagtttgaatttaattttcaataaaatggcttttttggttttgtta

SEQ ID NO: 840 - RNA, 6925 nt, Homo sapiens
  source 1..6925: mol_type = transcribed RNA
agtttccggcaatggtcgagagtttctaacgtgcccccttgttgtctctcggccgccgtcctctcaaccaccgccccccttttcggctccctctcccccttcccgttcccccagtcagcctggccctgctggtgcctccggcgctacgggctgggcaagatggcggccttcgggatcttgagctacgaacaccggcccctgaagcggccgcggctggggcctcccgatgtttaccctcaggaccccaaacagaaggaggatgaactgacggccttgaatgtaaaacaaggtttcaataaccagcctgctgtctctggggatgagcatggcagtgccaagaacgtcagcttcaatcctgccaagatcagttccaacttcagcagcattattgcagagaaattacgttgtaatacccttcctgacactggtcgcaggaagccccaagtgaaccagaaggataacttctggctggtgactgcacgatcccagagtgccattaacacttggttcactgacttggctggcaccaagccactcacgcaactagccaaaaaggtccccattttcagtaagaaggaagaggtgtttgggtacttagccaaatacacagtgcctgtgatgcgggctgcctggctcattaagatgacctgtgcctactatgcagcaatctctgagaccaaggttaagaagagacatgttgaccctttcatggaatggactcagatcatcaccaagtacttatgggagcagttacagaagatggctgaatactaccggccagggcctgcaggaagtgggggctgtggttccacgatagggcccttgccccatgatgtagaggtggcaatccggcagtgggattacaccgagaagctggccatgttcatgtttcaggatggaatgctggacagacatgagttcctgacctgggtgcttgagtgttttgagaagatccgccctggagaggatgaattgcttaaactgctgctgcctctgcttctccgatactctggggaatttgttcagtctgcatacctgtcccgccggcttgcctacttctgtacacggagactggccctgcagctggatggtgtgagcagtcactcatctcatgttatatctgctcagtcaacaagcacgctacccaccacccctgctcctcagcccccaactagcagcacaccctcgactccctttagtgacctgcttatgtgccctcagcaccggcccctggtttttggcctcagctgtatcctacagaccatcctcctgtgctgtcctagtgccttggtttggcactactcactgactgatagcagaattaagaccggctcaccacttgaccacttgcctattgccccgtccaacctgcccatgccagagggtaacagtgccttcactcagcaggtccgtgcaaagttgcgggagatcgagcagcagatcaaggagcggggacaggcagttgaagttcgctggtctttcgataaatgccaggaagctactgcaggcttcaccattggacgggtacttcatactttggaagtgctggacagccatagttttgaacgctctgacttcagcaactctcttgactccctttgtaaccgaatctttggattgggacctagcaaggatgggcatgagatctcctcagatgatgatgctgtggtgtcattgctatgtgaatgggctgtcagctgcaagcgttctggtcggcatcgtgctatggtggtagccaagctcctggagaagagacaggcggagattgaggctgagcgttgtggagaatcagaagccgcagatgagaagggttccatcgcctctggctccctttctgctcccagtgctcccattttccaggatgtcctcctgcagtttctggatacacaggctcccatgctgacggaccctcgaagtgagagtgagcgggtggaattctttaacttagtactgctgttctgtgaactgattcgacatgatgttttctcccacaacatgtatacttgcactctcatctcccgaggggaccttgcctttggagcccctggtccccggcctccctctccctttgatgatcctgccgatgacccagagcacaaggaggctgaaggcagcagcagcagcaagctggaagatccagggctctcagaatctatggacattgaccctagttccagtgttctctttgaggacatggagaagcctgatttctcattgttctcccctactatgccctgtgaggggaagggcagtccatcccctgagaagccagatgtcgagaaggaggtgaagcccccacccaaggagaagattgaagggacccttggggttctttacgaccagccacgacacgtgcagtacgccacccattttcccatcccccaggaggagtcatgcagccatgagtgcaaccagcggttggtcgtactgtttggggtgggaaagcagcgagatgatgcccgccatgccatcaagaaaatcaccaaggatatcttgaaggttctgaaccgcaaagggacagcagaaactgaccagcttgctcctattgtgcctctgaatcctggagacctgacattcttaggtggggaggatgggcagaagcggcgacgcaaccggcctgaagccttccccactgctgaagatatctttgctaagttccagcacctttcacattatgaccaacaccaggtcacggctcaggtctcccggaatgttctggagcagatcacgagctttgcccttggcatgtcataccacttgcctctggtgcagcatgtgcagttcatcttcgacctcatggaatattcactcagcatcagtggcctcatcgactttgccattcagctgctgaatgaactgagtgtagttgaggctgagctgcttctcaaatcctcggatctggtgggcagctacactactagcctgtgcctgtgcatcgtggctgtcctgcggcactatcatgcctgcctcatcctcaaccaggaccagatggcacaggtctttgaggggctgtgtggcgtcgtgaagcatgggatgaaccggtccgatggctcctctgcagagcgctgtatccttgcttatctctatgatctgtacacctcctgtagccatttaaagaacaaatttggggagctcttcagcgacttttgctcaaaggtgaagaacaccatctactgcaacgtggagccatcggaatcaaatatgcgctgggcacctgagttcatgatcgacactctagagaaccctgcagctcacaccttcacctacacggggctaggcaagagtcttagtgagaaccctgctaaccgctacagctttgtctgcaatgcccttatgcacgtctgtgtggggcaccatgatcccgatagggtgaatgacatcgcaatcctgtgtgcagagctgaccggctattgcaagtcactgagtgcagaatggctaggagtgcttaaggccttgtgctgctcctctaacaatggcacttgtggtttcaacgatctcctctgcaatgttgatgtcagtgacctatcttttcatgactcgctggctacttttgttgccatcctcatcgctcggcagtgtttgctcctggaagatctgattcgctgtgctgccatcccttcactccttaatgctgcttgtagtgaacaggactctgagccaggggcccggcttacctgccgcatcctccttcaccttttcaagacaccgcagctcaatccttgccagtctgatggaaacaagcctacagtaggaatccgctcctcctgcgaccgccacctgctggctgcctcccagaaccgcatcgtggatggagccgtgtttgctgttctcaaggctgtgtttgtacttggggatgcggaactgaaaggttcaggcttcactgtgacaggaggaacagaagaacttccagaggaggagggaggaggtggcagtggtggtcggaggcagggtggccgcaacatctctgtggagacagccagtctggatgtctatgccaagtacgtgctgcgcagcatctgccaacaggaatgggtaggagaacgttgccttaagtctctgtgtgaggacagcaatgacctgcaagacccagtgttgagtagtgcccaggcgcagcgcctcatgcagctcatttgctatccacatcgactgctggacaatgaggatggggaaaacccccagcggcagcgcataaagcgcattctccagaacttggaccagtggaccatgcgccagtcttccttggagctgcagctcatgatcaagcagacccctaacaatgagatgaactccctcttggagaacatcgccaaggccacaatcgaggttttccaacagtcagcagagacagggtcatcttctggaagtactgcaagcaacatgcccagcagcagcaagaccaagcctgtgctcagctctctagagcgctctggtgtatggctggtggcccccctcattgctaaactgcccacctcagtccagggacatgtgttaaaggctgctggggaagaattggagaagggtcagcacctgggttcctcttcacgcaaagaacgtgatcgacaaaagcagaagagcatgtccctattgagccagcagcccttcttatcgctggtgctaacatgtctgaaagggcaggatgaacaacgcgagggactccttacctccctctacagccaggtgcaccagattgtgaataattggcgagatgaccagtacttagatgattgcaaaccaaagcagcttatgcatgaggcactcaaactgcggctcaacctggtggggggcatgtttgacacggtgcagcgcagcacccagcagaccacggagtgggccatgctcctcctggagatcatcatcagcggcactgtcgacatgcagtccaacaatgagctcttcactactgtgttggacatgctgagcgtgctcatcaatgggacattggctgcagacatgtctagcatctcgcaaggtagcatggaggaaaacaagcgtgcatacatgaacctggcgaagaagttgcagaaggagttgggggagcgccagtcagacagtctggaaaaggttcgccagctgctgccactgcccaagcagacccgagatgtcatcacgtgtgagccacagggctcccttatcgataccaagggcaacaagattgctggcttcgattccatcttcaagaaggagggtctacaggtttccaccaaacagaagatctcgccctgggatctttttgaggggttgaagccgtcagcaccactctcttggggctggtttggaacagtccgagtggaccggcgagtggctcgaggagaggagcagcagcggttgctgctctaccacacacacctgaggccccggccccgcgcctattacctggagccactgccactgcccccagaagatgaggagccgcctgctcctaccctgctagagcctgagaaaaaggctccagagccccccaaaactgacaaaccgggggctgctccacccagtactgaggaacgcaagaagaagtccaccaagggcaagaaacgcagccagccagctaccaagacagaggactatggaatgggcccgggtcggagcggcccttatggtgtgacagtgcctccggacctcctgcaccacccaaaccctggttctataacacaccttaactacaggcaaggctccataggcctgtacacccagaaccagccactacctgcaggtggccctcgtgtggacccataccgtcctgtgcgcttaccaatgcagaagctgcccacccgaccaacttaccctggagtgctgcccacaaccatgactggcgtcatgggtttagaaccctcctcttataagacctctgtgtaccggcagcagcaacctgcggtgccccaaggacagcgccttcgccaacagctccagcagagtcagggcatgttgggacagtcatctgtccatcagatgactcccagctcttcctacggtttgcagacttcccagggctatactccttatgtttctcatgtgggattgcagcaacacacaggccctgcaggtaccatggtgccccccagctactccagccagccttaccagagcacccacccttctaccaatcctactcttgtagatcctacccgccacctgcaacagcggcccagtggctatgtgcaccagcaggcccccacctatggacatggactgacctccactcaaaggttttcacaccagacactgcagcagacacccatgataagtaccatgactccaatgagtgcccagggcgtccaggcaggcgtccgttcaacagccatcctacctgagcagcagcagcagcagcaacagcagcaacagcaacagcagcagcagcagcaacagcaacagcagcagcagcagcagcagtaccacatccggcagcagcagcagcagcagatcctgcggcagcagcagcaacagcaacagcagcagcagcagcagcagcaacagcaacagcagcagcagcaacagcaacaacagcaacaccagcagcaacagcagcaacaggcggctcctccccaaccccagccccagtcccagccccagttccagcgccaggggcttcagcagacccagcagcagcaacagacagcagctttggtccggcaacttcaacaacagctctctaatacccagccacagcccagtaccaacatatttggacgctactgagccacctggaggaactgcttgtgcactggatgtggccccaccctttcctcttaattcccaatcccattcctgggctagcaccagtagtggttggggccctcccctcaggctccatttttaataagtttttagtatttttgttaatgtgaggcattgagctgttgggttttgtatattatttatatagagaccccagagctgttgcacccaatacacagagcttctttgcaaa

SEQ ID NO: 841 - RNA, 12289 nt, Homo sapiens
  source 1..12289: mol_type = transcribed RNA
ctcccgccggggccccggatgcactgagcggctgcggcgcggcttccatcctcccgccctcctgacgcggccggagcgcagccctgaggcccagggagaacgacacattggatacagaagggaggtgatcatgcaccatggcactggcccccagaacgtccagcatcagctgcagaggtccagggcctgccctggcagcgagggtgaggagcagccggcccaccccaacccacccccgtcccccgcagctcccttcgctccctcagcaagcccgtcggcaccccagtctcccagttatcaaatacagcagctgatgaataggagccctgcaaccgggcagaacgtgaacatcaccctgcagagcgtgggccctgtcgtcgggggaaaccagcagatcacactggccccactgccgctccccagccccacctctccaggcttccagttcagcgctcagcctcggcggtttgagcatgggtctccatcatacattcaggtcacgtcccccttgtcccagcaggtccagacccagagtcccacgcagcccagtccggggccggggcaggccttgcagaatgtgcgtgcaggtgcccctggccctgggctgggcctctgcagcagcagccctacagggggcttcgtggatgccagcgtgctggtgaggcagatcagcttgagcccctccagtggtggacactttgtgtttcaggatgggtcagggctcacccagatcgcccagggagcccaggttcagctccagcacccgggtacgcccatcacagtccgagagcggagaccctcccagccccacacacagtcagggggcaccatccaccacctgggaccccagagccctgcagccgcgggtggggccggcctgcagcccctggccagcccaagccacatcaccacggctaacttgccaccgcagatcagcagcatcatccagggccagctggttcagcagcagcaggtgctgcaggggccgccgctgccccggcccctgggcttcgagaggacacccggcgtgctgctccccggggctgggggcgcagcggggtttgggatgacgtccccacccccgcccaccagcccttccaggactgccgtgcccccaggcctttccagcctcccactcacgtctgtggggaacacgggaatgaagaaggttcccaagaagttagaggagattcccccagcctctccggagatggcacagatgaggaagcagtgcctggactatcattaccaggagatgcaggctctgaaggaggtcttcaaggagtatttgattgaactgtttttcttgcaacactttcaagggaacatgatggatttcttagctttcaagaagaaacattatgccccattacaagcatatcttaggcagaatgatttggacattgaagaagaggaggaggaggaggaagaggaggaagaaaaatctgaggttatcaatgacgagcagcaagccctcgcagggagcctggtagcaggggccggaagcacagtagagacggacctgtttaagaggcagcaggcgatgccctccacaggtatggcagagcagtctaagaggcctcgccttgaagtgggtcaccaaggggtagttttccagcacccaggggcggacgcaggcgttcctctccagcaactaatgccgaccgcacaaggaggaatgccccccacgccgcaggccgcgcagctcgctggacagaggcagagtcagcagcagtatgacccctccacggggcctcccgtgcagaacgctgccagcttgcacaccccactgccgcagctgcccgggaggctgcccccagccggtgttcccactgcagccctctcctctgcgctgcagtttgcacagcagccgcaagtggtagaggcccagacacagctccaaatcccggtgaagactcagcagcccaatgttcccatccctgcaccgcccagcagccaactccccatccctccctcgcagcctgcacagctggccctccacgttcccacacctggaaaggtgcaggtgcaggcctctcagctttcctccctgccacagatggtagcatcgacaaggctccctgtggaccctgccccgccctgcccacggcctctgcccacctcttctacctcgtccctcgcgcctgtgagtggctccggcccaggaccctcccctgctcgatcctctccagtaaatagaccttcctcagccaccaataaggcactatctccagtcacttcccggaccccaggggtggtggcatctgcccccaccaaaccacagagtcctgctcagaatgccacctcgtcccaagacagttctcaggatacgctgacagaacaaataactctggagaaccaggtgcatcagcgcattgcggagctgaggaaagcaggtctgtggtcccagaggcgtctgccaaagctgcaggaggccccacgccccaagtcccactgggactatctgctggaggagatgcagtggatggccacagactttgcccaggagaggaggtggaaggtggctgctgcgaagaagctcgttagaactgtggtgcgccatcacgaggagaagcagctccgtgaagaaagggggaagaaggaagagcagagcagactgaggcggatagccgcctccacggcccgggagatagagtgcttttggtcgaatattgaacaggttgtggaaataaaactacgagtagaattagaagaaaaaaggaagaaggccttaaatttacagaaagtttccaggagagggaaagaattgagacctaaaggatttgacgcattacaggaaagttctctggattcaggaatgtctggaagaaaaagaaaagctagcatatctttgactgatgacgaagtggacgatgaagaggaaacaattgaagaggaggaagcaaatgaaggcgttgtggaccaccaaacagaactttctaatttagccaaggaagctgagctgcccctcctggacctgatgaagctgtacgaaggcgccttcctgccgagttctcagtggccccggccgaagcctgatggggaggacacaagcggagaggaagatgcagatgactgtccaggcgacagggagagtcgcaaggacttggttctcatcgactcgcttttcatcatggatcagttcaaagctgccgagaggatgaatatcgggaagccaaacgccaaggacattgcggacgtcactgcggtggctgaagccatcctgccgaagggcagtgctcgggtcacaacctcggtcaagtttaatgctccatctttgttgtatggggctctcagagattatcagaagattggcctggactggctggccaaactttacaggaagaatctcaatggcatattggcagatgaagctgggctgggtaaaacagtgcagatcattgctttttttgcccacctagcttgtaacgaaggtaattggggcccccatcttgttgttgtgagaagttgtaacatactcaagtgggagcttgaattgaaacgttggtgtcccggactcaaaatcctctcatatattggcagccacagagaactcaaagcaaagagacaggagtgggccgaacccaacagcttccacgtctgcatcacgtcctacactcagttcttccggggcctcaccgccttcacacgagtgcgctggaagtgcctggtcattgatgagatgcagcgcgtgaagggcatgaccgagaggcactgggaagcggttttcaccctgcagagccaacaacgtctgcttctgatcgactcgccgctgcacaataccttcctggagctctggaccatggtgcacttcctggtcccagggatctccaggccctacctgagctcccctctgagggcccccagtgaagagagccaggattactaccataaagtggtcataaggttacacagggtgacacagccatttattttgaggagaactaagagagatgtggaaaagcaactaacaaagaaatatgagcatgttttgaagtgtcgcctttctaaccgacaaaaagccttatacgaggacgttatcctgcaacctggcactcaggaggccttgaagagcgggcactttgtcaacgtcctgagcatccttgtgcggctgcagcgcatctgcaaccaccctgggctcgtcgagccccggcacccaggctcttcctacgtggcggggccactggagtatccgtccgcatctctaatcctgaaggcactggagagagatttctggaaggaagcagatctttctatgtttgatctcatcggcttagaaaataaaatcactcgtcacgaggcagagttgctgtctaagaaaaagataccgcggaaactcatggaggaaatctccacttcagcagccccagcagcccgaccagcagcagcaaagctgaaggccagcaggttgtttcagcctgtgcagtatggccagaagcccgagggtcgcaccgtggctttccccagcactcacccgccccggacggcagcccccaccacggcctctgctgctccacagggcccgcttcgaggacggccgcccatcgccacgttctctgccaatccggaggcaaaagcagcagcagccccgtttcagacctctcaggcttccgccagtgctccacgacaccagcccgcctcggcctccagcacagccgctagcccggcccatcctgcgaaactgcgggcccagaccacagcacaggcctccaccccaggccagcccccgccccagccccaggccccctcgcacgcggccgggcagagcgcgctgcctcagaggctggtgctcccctcgcaggcccaggcccgcttgcccagtggagaggtagtgaaaatagctcagctggcatccatcacaggaccacagagccgcgtggctcagccagagacgccggtgacactgcagttccagggcagcaagttcaccctgtcacacagccagctccggcagctcacagcgggccagccgctgcagctgcaaggcagcgtcctccagatcgtgtccgcccccgggcagccctaccttcgagcccctggccctgtggtgatgcagaccgtgtctcaggcgggcgctgtgcacggcgccctgggaagcaagcccccggccggcggtcccagccctgcacccttgaccccacaagttggcgttccgggccgcgtggcggtgaatgccttggctgtaggagaacccggaacggcctccaaaccagcttctcccattggagggccgacccaggaggaaaagaccagactcttgaaagagcgcctggatcagatttatttagtcaacgagcggcgctgttctcaagctccagtctatggcagagacttgctaaggatttgtgccctgcctagccatggaagggtacagtggcgtgggtccctggatggccgtcgtgggaaggaggccgggccagcgcacagttacacttcatcctcagaaagtccaagtgagctgatgttgacgctttgtcggtgtggagagtctctgcaggatgttattgacagggtggcctttgtgattcctccggtggtggcagcacccccgtccctacgggtgccgcggccgccacccctgtacagccacagaatgaggatcttgaggcagggcctgagagagcacgctgcgccgtacttccagcagctgcggcagaccacggctccacgcctgctgcagttccctgagctgaggctggtgcagttcgactcagggaagttggaagctttagctatcttgcttcagaaattgaaatctgaaggacgtcgggtgctgattttatcacagatgattcttatgttggacattttagagatgttcttgaacttccattacctcacctatgtaagaatcgatgaaaatgccagcagtgagcaacggcaggaactgatgaggagtttcaacagagacaggcggattttttgtgccattctctccactcacagccgtaccacaggtataaaccttgtagaggcggacaccgtcgtgttttatgacaatgacctgaatccagtgatggatgccaaagctcaggagtggtgcgataggatcgggagatgcaaagacatccacatatacaggcttgtgagtggcaattccattgaagagaaattgttgaaaaatggaactaaagatctgatccgagaagtggctgctcagggaaatgactactccatggctttcttaactcagcgaaccatccaggagctgtttgaagtttattctcccatggatgatgctggcttcccggtcaaagctgaggagtttgtggtgctttctcaggaaccttctgtcacggaaaccattgcacccaaaattgcaagacctttcatagaggccctcaagagtattgagtatctggaggaggatgcccagaagtccgcacaggagggggtgctgggaccacacactgatgctctgtcatcagactctgagaacatgccgtgtgatgaagaaccatcccaattagaggagctagctgacttcatggagcagcttacaccaattgaaaaatatgctttaaattacctggaattattccatacttctattgagcaagaaaaggagagaaacagtgaggacgcagtgatgactgcagtgagggcatgggagttctggaacctgaagaccctgcaggagagggaggcccggctgcggctggagcaggaggaggcggagctcctgacctacacgcgagaggatgcctacagcatggagtatgtctacgaagatgtcgatgggcagacagaagtcatgccgctctggaccccacccaccccgccgcaggacgacagcgacatctacctcgactcggtcatgtgtctcatgtatgaagccactcccatcccagaggctaagctgccccctgtgtacgtgaggaaggagcggaagcgacacaaaacagacccctcagctgcaggcaggaagaagaagcagcgtcacggggaggcggtcgtccctcctcggtccctgtttgaccgcgcaacaccaggacttctgaaaattcgcagagagggcaaggagcagaagaagaatattctgctgaagcagcaggtgccattcgccaagcccctgccaacttttgccaaacccacagctgagcctggtcaagacaaccccgagtggctcatcagtgaggactgggcgctgctgcaggctgtaaagcagttactggagctgcctttgaacctcacaatcgtgtcacctgctcacacacctaattgggatcttgtcagtgacgttgttaactcctgtagccgaatctaccgctcttccaaacagtgccggaatcgctacgagaatgtcatcattccacgagaggaggggaagagtaaaaacaaccgtcctctccgtacgagccagatctatgcccaggatgagaatgccacacacacccagctgtacacgagccactttgacttaatgaaaatgactgctggcaagaggagtcccccaatcaaacctctgcttggcatgaatccctttcagaagaaccccaagcacgcgtctgtgttggcagaaagtggaatcaactatgacaagccgctgcctcccatccaggtggcatctctccgtgcagagcgaatcgcaaaagagaaaaaggctctggctgatcagcagaaggcacagcagccggccgtggcccagccacccccgccccagccgcagcccccaccacccccgcagcagccaccgccaccgctgccacaaccacaggcagcgggcagccagccgccagcagggccaccagctgtccagccccaaccccagccacagccccagacccagccacagcctgtgcaggccccagcgaaggcgcagcccgcaatcacgacggggggcagtgcagccgtactggcaggaaccattaaaacatcagttactgggacgagcatgcccactggtgccgtgagtggaaatgtgatcgtgaacaccatcgcaggggtcccagctgccaccttccagtccatcaacaagcgcctggcgtcgccagtggctcctggggccttgactacgccgggaggctctgctcccgcccaggtggtgcacacccagcccccgccacgggcagtcggctccccagccacggcgacccctgacctggtgtccatggcaacgactcagggtgttcgagcggtcacttctgtgacagcctcggccgtggtcactaccaacctgaccccagtgcagaccccggcacggtctttggtgccccaagtgtcccaagccacaggagttcagctccctggaaaaaccatcacacctgcacatttccagcttctcaggcagcagcagcagcagcagcaacaacagcagcagcagcagcagcagcagcagcagcagcagcagcagcaacagcagcagcagcaacagacgacgacgacctctcaggtgcaagttccacagatccagggccaggcccagtccccagcacagatcaaagctgtgggcaagctgacgccggaacacctcatcaaaatgcagaagcagaaactgcagatgcccccgcagcccccaccgccacaggcccagtctgcgcccccgcagccaacagcccaagtgcaagtgcagacctcgcagccgccgcagcagcagagcccccagctcacgacggtcacggccccaaggcctggtgccctgctgacgggcaccaccgtggccaacctccaggtggcccggctcacccgggttcccacttctcagctgcaggcgcaagggcagatgcagacccaggcaccccagccagcccaggtggccttggcgaagcctccggtggtgtccgtcccggcagctgtggtctcctcaccgggagtcaccaccctgcccatgaacgtcgcggggatcagcgtggcgatcggtcagccacagaaggcagcaggacagaccgtggtggcccagcccgtgcacatgcagcagctgctgaagctgaagcagcaggccgtccagcagcagaaggccatccagccccaggctgcacagggcccggcagccgtccagcagaagatcaccgcacagcagatcaccacccctggcgcgcagcagaaggttgcctacgccgcgcagccggcccttaagacccagtttcttaccacacccatctcccaggcccagaaactggccggggcccagcaagtgcagacccagatccaggttgcaaaacttcctcaagttgttcaacagcaaacacccgtggccagcatccagcaagttgcctctgcttcccagcaggcttctccacagactgtggcgctcacgcaggcgacggcggccgggcagcaggtgcagatgatccctgcagtgaccgcgactgcccaggtggttcagcagaaactcattcagcagcaggtggtgaccacggcgtcggccccgctccagactccaggcgctcccaacccagcccaggtgcccgccagctccgacagcccaagccagcagcccaagttacagatgagggtccctgctgtcaggctaaagacacctactaagcctccgtgccagtagtcagggcagcagggctgcctctcatctaaagcaaaactaccttcctcacagaaaacgctttattagtgaaccttgggaccatgtcacgcaagagattcagcactgggaaagatataattgaaacaaaatagtgtaatcattttattaaaatgcatcccacactgcaggacaaatggtccttatggagtgccgcgttctctgtactacgtggctcatggaaaaagtgacaacatggcttcctctaaatcatttcacctttcagtccccacccgcacccgtcccctagagccatagtactgtgttctgaaagccatttagaatttctttgtgagcatgtagtgctttgcacgccacagaagccgtctgccgtgtgtgaggagcatacaatggactttctaaagataaggcgtgggcttccacagtgtctgccagagtttagttctttataccttactgaaaaatgcctcgtggtcttcgcagaggggaaggcctgtctaaagtcaatcatccgagatgggttttccattccaaagaaaggcaatatggttccttccttccctcctaaaatatgacttaacttttaagagaaatgttctgacacccacctaaacacacaaggcacgttcctggcctgtgttcaagggaaatgatcagtcattgcattgttattccaaagagcagccaacagtggcctcccccaggccctaccctgcaatgggattcgctttcatttaatggaaacttctgggactgatgcccaactcagtgcactcaagacgcatctccagttttcgggggaagctggtatttgacatagtgtgttaaacagctcctgagaacctttgggacactctgccatggctggcgtgaggcccagaggaccacgcagaggcaatggtagtacagatgtcacagctgagggtacgatgaggcctgggctcagtgagccaggacgaatgtgacagacaccccttgctgccacagtcagccctttgacgaaggtgggctggtgattctggaagtattggctatagcggtgggcccagtcaactcttccttgtggacttacgacagcagattttctctaggataagcttgtgtggttctgccagtgaagcagagaaccacctgtgctgttgtggaaggcgtgccgttgagggggaaaacgaagcccagtatttgctactgtttttcctttttttactatgacaggaaaataaatgcaattttagtggaattgattgacagtgtctccttactttgaagttttcaccaaagcaaaaaggtccatatccaatagtatcctttgtgctgtggcttgattttggcctattttacattatttggtccaggaaattaggttatattaggttttttgtatactaaaaatcagttatggcacaataaagattttctgtttttaaattgtatttcatctgcttcctccccattctctcactttaagtgacattgaggaaggtattctgtcccacaggtttctgtggacagcgatacagcaggagtcagtgaaatcaactggggagctcacttgagctcttgataagaaatgtggagaaaagtaaaaaccaagctttgaagaaacagaagaaattaatcttttagttagttgaacataccaaagcagaggactggaatctgtttgttctaaccaacccgttctccctggcttggcacgtgccgtgagagcgcagcttgccggagggagggccgctgtgtgcgcctcacatctggctcccagtggaaacttttactcctcctcatccgcagatgtgatagaactgaagtatctaggaattctgcctttgtcatttgttttaatttgtgtgccctgttcattttttttgtctttcccaaatcttggtagtctccttatagttgaagataaaatgttgagtgcacttattttagaatatcctagacataactgtctaagtaaaagcgctctattaatctaaaacactacaagagaatttaacaccatctctcaaatgcttttttggagagcttaatgggattctgaatatttgcaatgtggagtttccgccccgatctcacgtcagtgagggtctcctgtctctcaagtgtgtttcctttggctgttccctaatacaaaacacggacatatttttactcgtagcactcaatttagtaacttctagatgctaccgttgacctgagttaaattcatttagtcgtgtacgtaaaaactctccttttagtgtgttattttcttggccttcccttttaaaggttaaagtttctaacctaagaattaagtacgcgttcaggaagctgttgtctaggccttccccttgtgaatctgggttcattccaatacggcaagtaagagttggaaactttgagaacacagactataaaggcagcagcccgaacactgtcagactctaattggcgaccctgggaaacagttgccctgctattctttaaagaaagacgtttattctgatgataaaaacagttagccagactgtttttaaagcacctggcgggaagcagaaggttggatccaagcccttgttcagatttggtgcctgataagacaggggtttctctttttgtgacctttattattattattttgttaactgttgtaaccagttagctgttgtgttttaagatagaaaggaacaagactaaaattgtaaatactttgtaaacatcagcatttgtacttgaatagtaggattttaaagggcattgatagcataccaaacaaaaggcaaaataaagtgacctttttatata

SEQ ID NO: 842 - RNA, 8024 nt, Homo sapiens
  source 1..8024: mol_type = transcribed RNA
atgcgcgcgcgtctcctgtcgccggccgctgcgctccgcggcgcggaatagaatgaactgtaacaaaacaagccgagcctttgtatctgcttaaaggggccgcgagcacttacctcccgccctgctccccgccgccccgccaccgcgtcttcagggctcccggcaactggctggaagggcttccctcaccctcagtaacagcctgccagcgaggagaggcgagccgggcgggaggcaaagaggaggcaccgcatttgtaaaaggcaagagagaaaggaaggaaggaaaaaaaaataacccgagcggcgcagagtggactctggtccgggagagcacgggcgggcgccggaacgtggacccagaggcaccggaatgcaaacaaagctcgcgggcgcctgtgcggggctcgcggggaagcccagaaagtttgttttatgatggcttgagtgcgcgagcgtgtgcaggggagcgaggctgccaagtttctctctcctgttttgtgatttggggagagatgtttctcccatgaacaagcggaggcttgggggctcgtgctgtggggggcacctgtctctcgttttatttttttggaggaggggtgtaactcatcatgtccaaagtgatccagaagaagaaccactggactagcagggttcacgaatgcaccgtgaagcggggaccccagggcgagctgggggtgacggtgctgggaggcgcggagcacggggagtttccgtacgtcggagcggtggcggcggtcgaggcagcggggcttcccggcggcggcgagggcccgaggctgggcgaaggggagctgcttctggaggtgcagggggtccgggtgtccggcttgccccgctatgacgtgctgggggtcatcgacagctgcaaggaggccgtcaccttcaaggccgtcagacaaggaggaaggctgaacaaggacctgcgacattttctcaatcagcgattccagaaggggtctcctgatcatgagctccagcagaccataagggataacctttaccgccatgctgtgccttgcacaacccgatctcccagagaaggagaagtgcctggcgtggactataactttctgactgtgaaggagttcttggacctcgagcagagtgggactcttctggaagtcggcacctatgaaggaaactattatgggacacccaagcctcctagccagccagtcagtgggaaagtgatcacgacggatgccttgcacagccttcagtctggctctaagcagtcgaccccgaagcgaaccaagtcctacaatgatatgcaaaatgctggcatagtccacgcggagaatgaggaggaggatgacgttcctgaaatgaacagcagctttacagccgattctggtgaacaagaggagcacactctccaagaaacagcattaccacctgtgaatagtagcatcatcgctgctcccatcacggacccttctcagaagttccctcaatacctacctctttctgcagaggataatttaggtcctctacctgaaaactgggagatggcctatactgaaaatggagaagtctattttatagaccataacacgaaaacaacatcttggttagaccctcggtgcctaaacaagcagcagaagccactggaagagtgtgaagatgatgaaggggtacacaccgaggagctggacagtgaactagaactgcctgctggttgggaaaagattgaagaccctgtctatggtatctactatgtagaccacatcaacaggaagacacaatatgagaacccggttctagaagccaaacggaagaagcagcttgagcagcagcagcagcagcaacagcagcagcaacagcagcagcagcagcagcagcagcagcagacagaagaatggacagaagatcactcagcccttgtgcctcctgttattccaaaccaccctccaagcaatccagagccagccagagaagttccacttcagggcaaacccttttttacacgaaacccttctgagttgaaaggcaagttcattcacacaaagctgcggaaaagcagtcgtggctttggcttcacggtggttggaggggatgaacctgatgagtttctccagatcaagagcttggtcctagatggtcctgctgcattggatggcaagatggaaacaggggatgtgattgtaagtgtgaatgacacctgtgttttgggacacacacatgctcaagttgtgaagatcttccagtccatccccattggtgccagcgtggaccttgaactctgccgaggttatccattgccttttgatccagatgaccccaatacaagtttagtgacctcggtagccattttggataaagaaccaattattgtgaatgggcaagagacctatgattcaccagctagccacagtagtaaaacaggcaaagtcaatggcatgaaggatgccaggccaagcagcccagcggacgtggcttcaaatagttctcatggttatcctaatgacactgtttctttggcttcctccatagccactcagccagaactcataactgttcatattgtcaaagggccaatgggctttggttttactatcgcagacagtcctggtgggggtggccaaagagtgaaacagattgttgacagcccaaggtgccgaggcctgaaagaaggggatctcatagtggaagttaataagaagaacgtgcaggccctaactcacaaccaagtggtggatatgctggttgagtgtcctaagggaagtgaggtcacattgttggtgcaacgaggagggctgccagttcccaagaagagcccaaagtcgcaaccactggaaaggaaagacagccagaatagttctcagcacagtgtttccagccaccgaagcctgcacacagcatccccaagccacagcacacaggtgctccccgagttcccacctgcagaggcccaagctccagatcaaactgacagctctggccagaaaaaaccagatccttttaaaatctgggcccagtccaggagcatgtatgaaaaccgacctatgtcaccttcacctgcgtcgggattgagcaagggtgagagagagagagaaatcaattccacgaattttggagaatgtccgattccagattaccaggaacaggacatcttcctctggagaaaagagactggatttggatttaggattctgggtggaaatgaaccaggggaacctatttatattggtcacatcgtaccactgggtgctgctgatactgacggccgcctgaggtctggagatgaattaatctgtgtggatgggacgccagtaattggaaaatcacaccagcttgtggtccagcttatgcaacaagctgccaagcaaggccacgtcaatctcacggtgcggcgtaaagtggtttttgcggtgcccaaaaccgagaacgaggtgccctcgccagcctcctctcatcacagtagcaaccagccggcctcgctgacagaagagaagcgcactccgcagggcagccagaactcgctgaacacggtgagctcgggcagcggcagcaccagcggcatcggcagtggcggcggcgggggcagcggcgtggtcagcaccgtggtgcagccctacgacgtggagatccggcgcggggagaacgagggcttcggcttcgtcatcgtgtcctcggtgagcaggcccgaagcaggcacgacctttggcaatgcatgtgtggctatgcctcacaaaataggtcggattattgaggggagccctgctgaccgctgtggcaagctgaaagtaggagaccggatcttggcagtaaatggatgttccatcaccaacaaatcccattcagacattgtgaacctaatcaaggaagcgggaaacacagttaccctccgcatcattcctggggatgagtcctcgaatgccaccttgctgaccaatgcagagaagattgccaccatcaccaccacacacaccccttctcagcaagggacccaggagacaaggaataccaccaaaccaaagcaggaatctcaatttgagttcaaagcaccccaagcaacacaggagcaagatttttacactgtggaactggaaagaggagccaagggatttggctttagccttcgaggaggccgagagtataacatggacctctatgttctgcgcttagcagaggacggtcctgcggagaggtgtggaaagatgaggattggtgatgaaattttagagatcaatggtgagaccaccaaaaacatgaagcattctcgagctatagaactgattaagaatggtggccgcagagttcgtctgtttctgaagcggggagacggctcagtaccagaatatgcgatgatacctcctaatatcgctgcatgtatgagaaatgaaaagctcggggaggcttgcttctaccttatgggccataatcaaactacgaccccagcagcgaccgccacggccccgccaccggtccacaaggtgttccggaagtgagggccgggcccgaccgccggcagcatccgtcattggagtccagttacccacccgatcttcacaaatcatcaccacatggggaaaagcgggcacacgcaagggatccgaaaggcagcagagagtatagcagacaacccaatgaacaccacacctggaatgggacttcgaggaaacccgacagcggggcatgccgacccaaggaccgggcgccggagggacggagggacgcgcaggccgagcgcgcggcagccgccaacggccccaagaggcggtccccagagaagcggagggagggcacccgcagcgccgacaacactttggagaggagggagaagcacgagaagagacgagacgtctctccggagcggaggcgagagcggtcacccacccgcaggagagacggctcccccagccggcggagacggtctctggagagactcctggagcagaggaggtcccccgagcgcaggagagggggctcgcccgagcgcagggccaagtccaccgaccggaggcgcgcacgctcccccgagcgcaggagagagcggtccctggacaaaaggaacagagaggacagagccagccaccgagaaagggaagaggcgaatctgaaacaggatgccggcagaagttccagacatcccccggagcagagaaggcgaccttacaaagaatgtagcaccgacctcagtatctgagacgctgagtcacattccaacctttaccgtgtcaaaggttctaagaggaaagtcacaaacctgaaattatttagtttcttacctaatgaagcatctgacacctgatgatcctatgaataacaacaaacattttatgcatttgaaatcttataagaaaaaatatatatgaaaagtattgtgcctgatgtatcatattaaagaaagtatttttaaatgcatacttttttggaaattatttgccaaatgctggcccaaagggatataaattttgtttctacgtaacctgtagaatcgtcaagaattgttcccgttttggggcaatctttttctctcctggttaaatggggctgttgatcattttctctacgtaagggaatttattgattaagtttaattaatttgatatagactgtcatgtagtgatgtagtgctatactgtagtcggaagtttttcttaaaagcaaagagcaaaaatgcaaagttttatttgtaaaagctgaggacccttggggatggattaggtttgccgatgatcctaaaagtaagcaaactgtatgacaagactactattgcaaatgaaggatatttatagctaaactgcgcagcacaaagaagttttatattgtgagttatagttggttcagaaaacagtttgtactctccctggcccaggaaggcacacagacaaaaatgtcggccacttttactcaaatacagcccaagcacagacagtcaggttcgtgatcatcaccaacatctgataaaatctcattgaaggcaatgccatcacagctttgctcaattactacgaggaagagacaacaagcatctttcgtgttgtctcgtctgattggaggctgaatagtagatggaatggggggacagtgtgcctggtgtgaggaagacgtaagatccccaatttggaaagcatgcccccctcccttttagtagaagcccatggttgccctttgccaaactggggaggaggcaatgagccttggtggaaggaacctctctgttgatatttaaagaagtgagggctgtgggtattcattgttagaaatgccaatttcactttgaaaccatagtccaagtctctaggttggtagaagggaaaggaaggaagtggtcccagtgattctaggtctggttgggaaacttctgcctcatgactctgtcctttgagtcctttggacagcagcacaaaacataacaatttttatttttaaacagacccattctttttgatcccacaggagctgtggttgggtcggccgtagccccgggatgtggtttaagtggattactgcctagctgagccaaaatgtttgcttgtacctgttggaccactacagcaaaccgctgcttacagtgcattgtgtatttctgtagtactgttttgcattttccatagagacagaaaactttgcaagtcaatcactgttgttcccatggtactgtaagaaaaaaaaaaaggaaaaagaaaaaaaaaaagaaaaccagccaatcattgcgtgtacagagctaaaaattgtaattaatagagcctgttgggaaaaaaaagaaaacaactgttgcctttttttcttgtataaaagagaatttatgacaaaatttagctgtgaggaatgtgatacgtgtttatatttctgaatatggaacaaattgattcatggggatatattttaatgtaaactaaatcaggtatgtaaagttgttttaaaatgggagactatataagtaattctctaaagctttagttggtttgaatatcatcatttcctccatggtgagcctgcttgtgaattattaagcacttgtttgcattctctgttcttcactcatttatttcttgcagtgtgctatggacttaatgctctttctgtattgatgaaaagcagtatgtgggccaatctttttataaaacactatgcatatataaatattacattgttcatagctttatttgacttatgggtttatacataacattagaatgagtagctgtagttgtgtggacatttataaaacaagttcctttcctggaacagacacaatatacattctgtagctaaaaaggagggaaaagtctgtgaatgctatttttattattaaagttttccatacaaagcatacattgagctgtagtaaggctgaggaagagtacaactgaataatgatgttctttttcatcaagttcctaagagctgacttggagattttattcccagggctccactgctaggattcttctcactagttctaacaaaatctgtgatgttaaatgactgatgctctcaattgtgatccagagttttaaataaatgaaatcaaggtggattttgggaatatatcctgaagttaacatcttgatgtccttcttgttgtaagatgatatttggcaatttaaaatctatgtgctacccacctgggcttgtctcaatccgtggactttttggtgtggcagtttcacctgaattccacacatcagatttgtttggaaatattgtactgtacagggactatgcattatgcagaaagatatagttttctttgaactgctgtaaccttaaattggaaactgattcttgtgagcctactttccttaatcccgccgcccccctcccccacttaatgtaaatgtcttgatgagagataatggatgagtattttgtatgatgaaatcaaacgatttaggaatttgtctccctccgttacacagttgatgcctgaaagaatgttgggggggaggactcaacaccctaattgtattttttaagtttcttttgtgaaagattttttaatgcatttttactgtaaaaatacatggaaatgtatgcattccacaacca

SEQ ID NO: 843 - RNA, 2232 nt, Homo sapiens
  source 1..2232: mol_type = transcribed RNA
gacttgaccccggaagtggggtgtgaagctccggtgctggtgcggcgggggactgcggggccagcctcaggtagcagcagcagcagcagcagcagcagcagcagcagcagcagcagcagcagcagcagcagcaatgtttcacttcttcagaaagcctccggaatctaaaaagccctcagtaccagagacagaagcagatggattcgtccttttaggagatacaacagatgagcaaagaatgacagcaagaggcaaaacttcggacatagaggccaaccaacctttggagaccaacaaagaaaattcatccagtgtgactgtatcagaccctgagatggaaaataaggcaggccagactctggagaacagctcattaatggccgagctcctgagcgatgtgccgttcaccctggccccgcatgtgctggcagtacagggcaccatcactgaccttcccgaccacttactctcctatgatggcagcgaaaacttatcacggttttggtatgatttcactcttgaaaattcagtgctctgtgattcataacctttatgtctgtttgcaccttaacagctttaaaatatgttcgcctattttatctaacctgtttgatgttctttgccgtttcactgtttaaggtcctcagcaaggatcataaagcaaagaaaatagcattatgttcactactctatttttaagaaaaaggtacatttgtatacaaattgaacttaagttctacttcctttctcccatataataaatatacaaattaggctatgaaggttttaggaaaggactcgattccttcagatggtctctcaaaatataacacctcaaatttatcttagaagaactgtgaaaaagaattgtggcatttttcagtcactacagctccgaagtctgagcaagaagtgggtgtgaagtctcctctctggtttgtaggaagttgaattggtgttattcctgcatttttttcttccacagtgtttatgaatgaattcagaaaaaaagttgccagttagcttaatttcttcagatgcattgatgtggaaatttaaaacttgtcctaaacagcagtgctagtttgctgatacaaggatgctagacctgctctgcgtgctctttctggagtggcccatttcggttttctgaaacccatggcagccctttccatcgtgaataatcgttgtgttcccacctttgttctctgcctttttgctacttcagtgtgctctctgaccagctttccaaagaactttccctgcttctgcctcggttgccatttgctctccttaccacatatgttcccagtttatgaagagatccacatttcctttcaacccctctgcctcctgaagaaaaacatctcatgatgatacatattattgctgataacacccttatttagaaatttgttggccacaatagagatggaaatgttttactgctggaaaaactgaaatcaactcatttccaattagagtataggcagaacacctagatatgacttttagttcttgaatatccattacttactttaatgaaaacagaactgccattggtcaataaactgtaaagggaagaggtaaattgtgatagagaattttctatgtcatgggaaattgaaatcacatttattttgattaccagcaatatgatttgttaactctgtgccaagttttaagtatattttttcacaaagatagagtgccatagtgaaactaaacactgtgcataaaggtacatgaattattccagttttaaagtattatgcatgtttgtttaataaatgtggcatggttttaatacaaatgctatgttatttaaaagttagaggaacatttctattgacaaaaatatgcttcatttacatataatgttaccatatggtgttaatgattaaattagatctttacatagttcttacaaagcatcagtctaggaaatatgacttattactgatgcaaacgtgaacattttgtagtagttttgtaaaagaacatccttttcaaatatctgtgttaatgtacccttgaaattaaatgcaagcacatagtcagtttgtctaattttgtgtgaaattttgtcgaaaatacctaaacatttcatctatatttgtgcctaccatgttataaatgttcataagtaccttcatgtgtctataaaaaatgttatatttaaataaatgtgaattaaaataaaatttttgattattttcagatccagaaaaa

SEQ ID NO: 844 - RNA, 730 nt, Homo sapiens
  source 1..730: mol_type = transcribed RNA
gatttgggaaggagctcggaatggagccgctggaagaggagacgcgtgcggggagagggcccgggcgggtgcctgtcccgtccacacttagtccccgcgccccgcgggcgcctgagattgtgagctggtcccgggagatgtccgaggacctcggcgcgccggccccagcagtgggcacgggggaagagggctggtggacgggatgtccccgggagagctggacttgcgccgcccgaggcccctcacctcttgcagggcgcgccgcctccggccccggtccggtcgcgctgtcgccggttcttgaaccagttgctgacctgcgtgagcgacaggccggtgtctatacacgccccgcggagcagacggcccacctcctcccggtcctccggggaaggggacacatgagggactcacctgtggctccctctgcctgcagcaactccatccgctcctgcaactgccggacgtgtgcctctaggtcccggttccgagcctctgcctcgcgtagttgactgtggggaggtaaggacggtgagtccgtccgggccggacgagaggggatgccaagggttgccaccggcccgcatcccggccccggccccggccccgatcccgacctggcgaagttctggttgtccgtgcggatggcctccatctcccggctcaggctctgccgggtgagcacctcctcctccagggcttcctggagctcccgcagcgtcacctcggc

SEQ ID NO: 845 - RNA, 4166 nt, Homo sapiens
  source 1..4166: mol_type = transcribed RNA
ggggacagcgcgagccgcagccggagcaggagcgccgagacgcgcctccggaacgtagagtaacaatcacaaccccacattccgggcgagcgtgagcacgagcgggaagggatgcgacccgggccgaggcgccgcgcgagcgccctgcagccaacgtgagcgccgccagccgcggcggcccgggcgccggccaggcctgggggcggcgggagcctgcgtgcgtgcactcctctcctctgctctcgtgcgtcctggaagcagtggccgcggcggctccctccggggtgcaaacccagtcgccgccagcagaacggccgacgctgcggaggggagaaggtcctttctcggctgccaccccctcccccggtcctccggggaagcagcggcttcagcaagattggacccgggcaccgggtggcactgaaccctctggccctcgccccagggggcccgtcggggagaggacgcagctcgtaggggggtccccggggagaggaagagacagcccctttcgagcttccacgcaccagccactccggggagggggccaagaggcaacggcggccaccaccgggcaccctcgccccctcccctcgggccgggagcttccagcccaagtctgcagcaccaggaagaaggcgcctgagctcccctcgcgacgagtcaaccgcagtaggaggtgggggcgaagagagggctgaacccgtccgctgcccgggcggtggagcccccacggcgaggcgctgcgccggcggtggagactcgcgttccctccagcccctggggcagaactttctcgccccccctcctccctcccccgcagtcggactccctccccagccggccagtcctcccggaggagaaggcgccgcggagacagcccgggcgggggcctaccttccccagggcaggcatcatgtcggcggcgcaggtgtcctcgtcccggagacaatcttgctacctgtgcgacctgccccgcatgccctgggccatgatctgggacttctcggaacccgtatgccgcggttgcgtcaactacgagggcgctgatcgcatcgaattcgtgatcgagacagcgcgccagctgaagcgggcgcacggctgcttccaggacggccgctcccccgggccgccgccgcccgtcggggtcaagacagtggccctgtcggctaaggaagcggcggcggcggcggcagcagcggcggccgccgccgccgccgcgcaacagcaacagcaacagcagcagcagcagcagcaacagcagcagcagcagcagcagcagcagcagcaacaacagctcaaccacgttgatggttccagcaagcctgcggtgctggcggccccgtctggcctggagcgctacggcctaagcgctgccgccgccgccgccgccgccgccgccgctgcggtggaacagcgcagccgcttcgagtacccgccaccgccggtgagcctgggaagcagcagccacaccgcgcgactgcccaacggcctggggggcccaaacggcttccccaaaccaacaccagaggagggacccccagagctgaaccgtcagagccccaattcttcttcagcggcggcgtcggtggcgtctcggcgtggaacgcacggtgggctggttacggggctgcccaacccggggggtggcggaggcccccagctcaccgtgccccccaacctgctaccgcagacgctgcttaacggcccggccagcgctgcggtactccccccaccccctccccacgccctgggcagccgtgggcccccgacgcctgctcccccaggggctcctgggggccccgcttgtctcgggggtaccccgggtgtatcggccacgtcgtcctccgcgtcgtcttcgacctcttcgtcggtggcagaggtgggcgtgggtgctggtggtaagaggcccggctcggtgtcgagcacagaccaggagcgcgagttgaaggagaagcagcgcaacgccgaggccctggccgagctgagcgagagcctgcgcaaccgcgccgaggagtgggccagcaagcccaagatggtccgcgacacgctgctcacgctggcaggctgcacgccctacgaggttcgcttcaagaaggaccactcgctgctgggccgcgttttcgccttcgacgccgtctccaagcccggcatggactacgaattgaagctgttcattgagtaccccacgggctcgggcaacgtgtactccagtgcatctggtgtggccaagcagatgtatcaggactgcatgaaggacttcggccggggcctatcctcgggtttcaagtacctggagtacgaaaagaagcacggctccggggactggcgcctgcttggagacctgctccccgaagccgtgcgcttcttcaaggagggcgtgcccggcgccgacatgctgccccagccctacctggacgccagctgtcccatgctgcccactgctctggtgagtctgagccgcgcccccagcgcacccccggggaccggggccttgccgcccgccgcgccgtcgggccggggcgcagccgccagcctgcgcaagagaaaggcctctccggagcccccggactcagccgagggcgcgctgaagctgggcgaggaacagcagaggcagcagtggatggcgaaccagagcgaggcgctgaagctcaccatgtccgccgggggcttcgcggcgccggggcacgcggcggggggtccgcctccgccgcccccacctctgggaccccattccaaccggaccaccccacctgagtcagccccccagaacggtccgtcccctatggccgctctcatgtcggtggcagatactctgggcacagcgcactcgcccaaggatggcagttccgtgcactctaccactgcgtcggcgcggcgaaacagcagcagcccagtctcgccggcctccgtgccggggcagcgccgcttggcatcacgtaacggggacctgaatttacaggtggcgcccccgccgcctagcgcccacccgggcatggaccaagtgcacccccaaaacattccggattcccccatggccaacagcggacccctctgctgcaccatttgccacgaacgtttggaggatacgcatttcgttcagtgcccttccgtccccagccacaaattttgcttcccttgctctagagagagtatcaaggcccagggggccaccggcgaggtgtattgccccagcggagagaaatgccccctagtcgggtcgaatgtaccttgggccttcatgcagggcgaaatcgcgactatcttagctggggatgttaaagtgaaaaaggagagagacccttgaaccactgggcagccacctcctttgccctagaccagctcctctccaatcctgagggcccctcccccaacccaactcgaccctccctcccctcacccccaaggtgtagaattgtgaatataacgaaactgcaaaaagttagtcttatgtatagacattattttcgtcgtatgtttctatattttgaaacaaaggtatgtaacttcttcatttgaaggataagctggtttgtgttaagcagtatagtattggttgggtcatttgcatcatatcgttagcatttatttggtggcagaatgtttgcctaggtacagaattaatagcccttagcaacgactgctgctggtgtgtatttttgtaaatgttatgcactctctgaaaggaaaaacacacacaaaagaaaaagacttttttttttttttttttttttttgccaaggccagtgttgctgcctaaaaaaaaaaaaaaaaaaaaaaaaaaaaaaaaaaaatgctataaaatggtgaaagcttccttctaaactgccccaagtgttgaagtcttcactttattttgttgttttgttttgtttttctgttttgtttgcaaaatggtaagggggtgtcgggggggatggggtgtattttgttgcaagtttgtgaggggaaaatgttttggtttgtttctactgacctgaatgtgttggatctacacgtgttgttttgtttttgctttattgatgcacggatgcttttgaacagtagagcgaaatgctagacatggagaatctgctctgtttgtcctttatacatttctgtagttaacagaacactgtaatgtgccttggagcttagtaacttgtaataaattcaattgatattaa

SEQ ID NO: 846 - RNA, 2901 nt, Homo sapiens
  source 1..2901: mol_type = transcribed RNA
agacaaaccaacagcagcttcttctgacatatacacacgcacactcaccccggacacacactcagcacacttttcctccatttgattaacagtgctgcacacacaatgattacgggaaagcgcaaataaatacggaaaggggtgcttattttgactactggaagagctttgctgggtctcagcgcaacttttgttttttattcctgagaaggtgatctctccatgcggttctctcacacaaggattctttaaaagaggaagagagacaagcagaggggggaggacagtctttcactttaagaacggctgggctcaaagataaaaggaagggaaaagcagcagcagcagcagcagcagcagcagcagcagcagcagcagcagcagcagcagcagggaaaccaacgctgcagcacttccgaaaggcatttttgatccatttctgagtgttgcggcccgtttctccaccgaagttggctccagctctagcagccgcattggatcccacagcttactgcgagactccggtgtacaatccggatctctgccccaacatgattgcggcccaggccaagctggtctaccatctgaataaatactacaacgaaaaatgccaagccaggaaagctgccattgccaaaactatccgggaagtctgcaaagtagtttccgacgtactgaaggaagtggaagtgcaggagccgcggttcatcagctctctcaacgagatggacaatcgctacgagggcctcgaggtcatctcccccaccgaatttgaagtggtgctttatctcaaccaaatgggggtgttcaacttcgtggacgatggctcactgcccggctgcgcggtgctgaagttgagcgacgggcgcaagaggagcatgtccctctgggtggaattcattaccgcctccggctacctctcggcgcgcaaaatccggtccaggtttcagacgctggtggctcaagcggtagacaaatgtagctaccgggatgtggtaaagatggtggcagacaccagcgaagtgaaactgagaatccgagataggtacgtggtgcagatcacgccggcctttaaatgcaccgggatctggccgaggagtgctgcccactggccacttccccacatcccctggccgggacccaaccgggtggcggaggtcaaggcggaaggtttcaatctcttgtccaaggagtgccactccttggccggcaagcagagctcggcggagagcgacgcctgggtgctgcagttcgcggaggcagagaacagactgcagatggggggctgcagaaagaagtgcctctccatcctcaaaaccttaagggatcgtcaccttgaactgccgggccagcccttgaacaattaccatatgaagactctggtttcctacgagtgtgaaaagcatccccgagagtcggactgggacgagtcttgcctgggtgatcggctgaacgggattttgctgcaacttatctcctgcctgcagtgccggcggtgtccccactactttctaccgaacttagatctgtttcaaggcaaacctcactcagctctggaaaacgctgccaaacaaacgtggcgactggcaagagagatcctgaccaacccgaaaagtttggaaaaactttagaggatgatttaatcaagagccgaaattattacccttctcaaagtccttattaagtgtaaacttctgttcaattcctaatattccactccgcagtgcaaacaatctcttcctttaaaaaggaataataatacaatatttaaacatcatctcacccacccccacaaggggagaaaaagtaggggaagcggatggagaaaaacccaaagccactagtattagaagacttctttccacacgatttcctatctcccttgaaaagtacaccgtaacactccgtaaacagcccagctgtaacgccagaccgagacgaacactctgcctaactatcaaaggattatagcaatcctggtgatttaggtgcatctgtctgtgagtaaacacgatttggatatgccatctgaaagaaactgtaatgtatattttgatttgtaacaaatattgtgatctcacattgtctttgaaagtgtggatgttggtgttttgtgatttggtgaacagaacttaaattgccattctggatacttccagacattttccactaacaaagatatcatttaaaggtagatttcttcctggtacttttatctgtctttgaaagtgtctgaactttaaaaagtttacattttgtttcaaatattgcttgttctatttctaacattccataaatatacttgaaatgttatttaaatatattcaaagaaatttgaattcagcttatataataacgcttgaatatctgaattatatatttgaaaaatgcacttgaaatacactggataattacttttgtgatttagattttaatttgttgctggtttttatttaattagatggtaataaatgaagtaaaataaaagttgttgtgtctcactttaaattgtttcctatcacaagatgtaatgatgcattttgaaaatcaaacccacttgaatatcttaaatattttgagaaatatgctaatgaaatccttaaaaataaaacattggagaaaagctctttctgtataggtccataagataacaatctactctcagtctctaacttacttgtaagacaattcctttctacaacagaaacaatttaaatctacctttgaaagcttgctcttcttgtagcatttttgataatataagaaaaaaagtctatcatgacagtagagatgactgagttaaaaatctgactaattcagaggaaatgaacttaacaaagtcataatgaaacttcgaaaattatgtatgaaaactaataaaacgatcctttctgaccaata

SEQ ID NO: 847 - RNA, 112 nt, synthetic construct
  source 1..112: mol_type = other RNA
acctactgactgccagggcacttgggaatggcaaggctgctgctaaagctgctgctgccagcagctttagcagcactcttgctatacccagaaaacgtgccaggaagagaac

SEQ ID NO: 848 - RNA, 112 nt, synthetic construct
  source 1..112: mol_type = other RNA
acctactgactgccagggcacttgggaatggcaaggctgctgctaaagctgctgctgccagcagcaaaagcagcactcttgctatacccagaaaacgtgccaggaagagaac

SEQ ID NO: 849 - RNA, 605 nt, synthetic construct
  source 1..605: mol_type = other RNA
gctcctgggcaacgtgctggttattgtgctgtctcatcattttggcaaagaattaagggcgaattcgagctcggtacctcgcgaatgcatctagatatcggcgctatgcttcctgtgcccccagtggggccctggctgggatttcatcatatactgtaagtttgcgatgagacactacagtatagatgatgtactagtccgggcacccccagctctggagcctgacaaggaggacaggagagatgctgcaagcccaagaagctctctgctcagcctgtcacaacctactgactgccagggcacttgggaatggcaaggctgctgctaaagctgctgctgccagcagctttagcagcactcttgctatacccagaaaacgtgccaggaagagaactcaggaccctgaagcagactactggaagggagactccagctcaaacaaggcaggggtgggggcgtgggattgggggtaggggagggaatagatacattttctctttcctgttgtaaagaaataaagataagccaggcacagtggctcacgcctgtaatcccaccactttcagaggccaaggcgctggatccagatctcgagcggccgcccg

SEQ ID NO: 850 - RNA, 605 nt, synthetic construct
  source 1..605: mol_type = other RNA
gctcctgggcaacgtgctggttattgtgctgtctcatcattttggcaaagaattaagggcgaattcgagctcggtacctcgcgaatgcatctagatatcggcgctatgcttcctgtgcccccagtggggccctggctgggatatcatcatatactgtaagtttgcgatgagacactacagtatagatgatgtactagtccgggcacccccagctctggagcctgacaaggaggacaggagagatgctgcaagcccaagaagctctctgctcagcctgtcacaacctactgactgccagggcacttgggaatggcaaggctgctgctaaagctgctgctgccagcagctttagcagcactcttgctatacccagaaaacgtgccaggaagagaactcaggaccctgaagcagactactggaagggagactccagctcaaacaaggcaggggtgggggcgtgggattgggggtaggggagggaatagatacattttctctttcctgttgtaaagaaataaagataagccaggcacagtggctcacgcctgtaatcccaccactttcagaggccaaggcgctggatccagatctcgagcggccgcccg

SEQ ID NO: 851 - RNA, 605 nt, synthetic construct
  source 1..605: mol_type = other RNA
gctcctgggcaacgtgctggttattgtgctgtctcatcattttggcaaagaattaagggcgaattcgagctcggtacctcgcgaatgcatctagatatcggcgctatgcttcctgtgcccccagtggggccctggctgctgctgctaaagctgctgctgctttgcgatgagagacagcagcagcttagcagctgtagtccgggcacccccagctctggagcctgacaaggaggacaggagagatgctgcaagcccaagaagctctctgctcagcctgtcacaacctactgactgccagggcacttgggaatggcaaggctgctgctaaagctgctgctgccagcagctttagcagcactcttgctatacccagaaaacgtgccaggaagagaactcaggaccctgaagcagactactggaagggagactccagctcaaacaaggcaggggtgggggcgtgggattgggggtaggggagggaatagatacattttctctttcctgttgtaaagaaataaagataagccaggcacagtggctcacgcctgtaatcccaccactttcagaggccaaggcgctggatccagatctcgagcggccgcccg

SEQ ID NO: 852 - RNA, 605 nt, synthetic construct
  source 1..605: mol_type = other RNA
gctcctgggcaacgtgctggttattgtgctgtctcatcattttggcaaagaattaagggcgaattcgagctcggtacctcgcgaatgcatctagatatcggcgctatgcttcctgtgcccccagtggggccctggctgtgctgctgaaactgctgctgctattgcgatgagtgaccagcagcagttcagcagaatagtccgggcacccccagctctggagcctgacaaggaggacaggagagatgctgcaagcccaagaagctctctgctcagcctgtcacaacctactgactgccagggcacttgggaatggcaaggctgctgctaaagctgctgctgccagcagctttagcagcactcttgctatacccagaaaacgtgccaggaagagaactcaggaccctgaagcagactactggaagggagactccagctcaaacaaggcaggggtgggggcgtgggattgggggtaggggagggaatagatacattttctctttcctgttgtaaagaaataaagataagccaggcacagtggctcacgcctgtaatcccaccactttcagaggccaaggcgctggatccagatctcgagcggccgcccg

SEQ ID NO: 853 - RNA, 605 nt, synthetic construct
  source 1..605: mol_type = other RNA
gctcctgggcaacgtgctggttattgtgctgtctcatcattttggcaaagaattaagggcgaattcgagctcggtacctcgcgaatgcatctagatatcggcgctatgcttcctgtgcccccagtggggccctggctggctgctgcaaatgctgctgctgtttgcgatgagactcgcagcagcatttcagcaactagtccgggcacccccagctctggagcctgacaaggaggacaggagagatgctgcaagcccaagaagctctctgctcagcctgtcacaacctactgactgccagggcacttgggaatggcaaggctgctgctaaagctgctgctgccagcagctttagcagcactcttgctatacccagaaaacgtgccaggaagagaactcaggaccctgaagcagactactggaagggagactccagctcaaacaaggcaggggtgggggcgtgggattgggggtaggggagggaatagatacattttctctttcctgttgtaaagaaataaagataagccaggcacagtggctcacgcctgtaatcccaccactttcagaggccaaggcgctggatccagatctcgagcggccgcccg

SEQ ID NO: 854 - DNA, 36 bp, synthetic construct
  source 1..36: mol_type = other DNA
acctactgactgccagggcacttgggaatggcaagg

SEQ ID NO: 855 - DNA, 36 bp, synthetic construct
  source 1..36: mol_type = other DNA
tcttgctatacccagaaaacgtgccaggaagagaac

SEQ ID NO: 856 - DNA, 318 bp, synthetic construct
  source 1..318: mol_type = other DNA
gctcctgggcaacgtgctggttattgtgctgtctcatcattttggcaaagaattaagggcgaattcgagctcggtacctcgcgaatgcatctagatatcggcgctatgcttcctgtgcccccagtggggccctggctgggatttcatcatatactgtaagtttgcgatgagacactacagtatagatgatgtactagtccgggcacccccagctctggagcctgacaaggaggacaggagagatgctgcaagcccaagaagctctctgctcagcctgtcacaacctactgactgccagggcacttgggaatggcaagg

SEQ ID NO: 857 - DNA, 247 bp, synthetic construct
  source 1..247: mol_type = other DNA
tcttgctatacccagaaaacgtgccaggaagagaactcaggaccctgaagcagactactggaagggagactccagctcaaacaaggcaggggtgggggcgtgggattgggggtaggggagggaatagatacattttctctttcctgttgtaaagaaataaagataagccaggcacagtggctcacgcctgtaatcccaccactttcagaggccaaggcgctggatccagatctcgagcggccgcccg

SEQ ID NO: 858 - DNA, 318 bp, synthetic construct
  source 1..318: mol_type = other DNA
gctcctgggcaacgtgctggttattgtgctgtctcatcattttggcaaagaattaagggcgaattcgagctcggtacctcgcgaatgcatctagatatcggcgctatgcttcctgtgcccccagtggggccctggctgggatatcatcatatactgtaagtttgcgatgagacactacagtatagatgatgtactagtccgggcacccccagctctggagcctgacaaggaggacaggagagatgctgcaagcccaagaagctctctgctcagcctgtcacaacctactgactgccagggcacttgggaatggcaagg

SEQ ID NO: 859 - DNA, 246 bp, synthetic construct
  source 1..246: mol_type = other DNA
tcttgctatacccagaaaacgtgccaggaagagaactcaggaccctgaagcagactactggaagggagactccagctcaaacaaggcaggggtgggggcgtgggattgggggtaggggagggaatagatacattttctctttcctgttgtaaagaaataaagataagccaggcacagtggctcacgcctgtaatcccaccactttcagaggccaaggcgctggatccagatctcgagcggccgccc

SEQ ID NO: 860 - DNA, 18 bp, synthetic construct
  source 1..18: mol_type = other DNA
ggagcgcaccatcttctt

SEQ ID NO: 861 - DNA, 18 bp, synthetic construct
  source 1..18: mol_type = other DNA
atgttgccgtcctccttg

SEQ ID NO: 862 - DNA, 24 bp, synthetic construct
  source 1..24: mol_type = other DNA
aaggacgacggcaactacaagacc

SEQ ID NO: 863 - DNA, 21 bp, synthetic construct
  source 1..21: mol_type = other DNA
tcacctggcctacaggataaa

SEQ ID NO: 864 - DNA, 22 bp, synthetic construct
  source 1..22: mol_type = other DNA
gcaaacgggaaggaaatgaatg

SEQ ID NO: 865 - DNA, 24 bp, synthetic construct
  source 1..24: mol_type = other DNA
acccagccgagaggaatgaggtta

SEQ ID NO: 866 - RNA, 21 nt, synthetic construct
  source 1..21: mol_type = other RNA
gctgctgctgctgctgctgct

SEQ ID NO: 867 - RNA, 21 nt, synthetic construct
  source 1..21: mol_type = other RNA
tgctgctgctgctgctgctgc

SEQ ID NO: 868 - RNA, 24 nt, synthetic construct
  source 1..24: mol_type = other RNA
ctgctgctgctaaagctgctgctg

SEQ ID NO: 869 - RNA, 24 nt, synthetic construct
  source 1..24: mol_type = other RNA
ctgttgctgctaaagctgctgctg

SEQ ID NO: 870 - RNA, 24 nt, synthetic construct
  source 1..24: mol_type = other RNA
ctgtgctgctgaaactgctgctgc

SEQ ID NO: 871 - RNA, 24 nt, synthetic construct
  source 1..24: mol_type = other RNA
ctggctgctgcaaatgctgctgct

SEQ ID NO: 872 - RNA, 24 nt, synthetic construct
  source 1..24: mol_type = other RNA
gtgctgctgctaaagctgctgctg

SEQ ID NO: 873 - DNA, 21 bp, synthetic construct
  source 1..21: mol_type = other DNA
ttgctgctaaagctgctgctg

SEQ ID NO: 874 - DNA, 21 bp, synthetic construct
  source 1..21: mol_type = other DNA
tgctgctgaaactgctgctgc

SEQ ID NO: 875 - DNA, 21 bp, synthetic construct
  source 1..21: mol_type = other DNA
ctgctgcttacgctgctgctg

SEQ ID NO: 876 - DNA, 19 bp, synthetic construct
  source 1..19: mol_type = other DNA
tgttctggcaatacctgca

SEQ ID NO: 877 - DNA, 19 bp, synthetic construct
  source 1..19: mol_type = other DNA
tgtgaagccacagatggca

SEQ ID NO: 878 - DNA, 23 bp, synthetic construct
  source 1..23: mol_type = other DNA
tctgtaaagccacagatggggca

SEQ ID NO: 879 - DNA, 19 bp, synthetic construct
  source 1..19: mol_type = other DNA
tgttctggcaatacctggc

SEQ ID NO: 880 - DNA, 22 bp, synthetic construct
  source 1..22: mol_type = other DNA
gcagcagccaaagcagcagcag

SEQ ID NO: 881 - DNA, 22 bp, synthetic construct
  source 1..22: mol_type = other DNA
gcagcacatctagcagcagcag

SEQ ID NO: 882 - DNA, 22 bp, synthetic construct
  source 1..22: mol_type = other DNA
gcagcagctttagcagcagcag

SEQ ID NO: 883 - DNA, 22 bp, synthetic construct
  source 1..22: mol_type = other DNA
agcagcagaaacagcagcagca

SEQ ID NO: 884 - DNA, 22 bp, synthetic construct
  source 1..22: mol_type = other DNA
gcagcagccatagcagcagcag

SEQ ID NO: 885 - RNA, 11 nt, synthetic construct
  source 1..11: mol_type = other RNA
actgtcctttt

SEQ ID NO: 886 - RNA, 10 nt, synthetic construct
  source 1..10: mol_type = other RNA
gaatggtggt

SEQ ID NO: 887 - RNA, 15 nt, synthetic construct
  source 1..15: mol_type = other RNA
tgtatatctgaaagg

SEQ ID NO: 888 - RNA, 26 nt, synthetic construct
  source 1..26: mol_type = other RNA
gtgttggggactcgcgcgctgggtcc

SEQ ID NO: 889 - RNA, 24 nt, synthetic construct
  source 1..24: mol_type = other RNA
acccggcgggcgcggcgacagcga

SEQ ID NO: 890 - RNA, 13 nt, synthetic construct
  source 1..13: mol_type = other RNA
ctgtagcgcaatt

SEQ ID NO: 891 - RNA, 15 nt, synthetic construct
  source 1..15: mol_type = other RNA
tgttttgagcggggg

SEQ ID NO: 892 - RNA, 21 nt, synthetic construct
  source 1..21: mol_type = other RNA
tcctctcatttgctatattca

SEQ ID NO: 893 - RNA, 13 nt, synthetic construct
  source 1..13: mol_type = other RNA
ttgtcataaaccg

SEQ ID NO: 894 - RNA, 15 nt, synthetic construct
  source 1..15: mol_type = other RNA
ctgactatgcctccc

SEQ ID NO: 895 - RNA, 11 nt, synthetic construct
  source 1..11: mol_type = other RNA
gggttgtagtc

SEQ ID NO: 896 - RNA, 12 nt, synthetic construct
  source 1..12: mol_type = other RNA
taaagctggaga

SEQ ID NO: 897 - RNA, 16 nt, synthetic construct
  source 1..16: mol_type = other RNA
aggcctcgctgttctc

SEQ ID NO: 898 - RNA, 13 nt, synthetic construct
  source 1..13: mol_type = other RNA
cacggcggggaca

SEQ ID NO: 899 - RNA, 16 nt, synthetic construct
  source 1..16: mol_type = other RNA
ttctactgctcactca
